(19) United States
(12) Patent Application Publication
(10) Pub. No.: US 2006/0211015 A1
(43) Pub. Date: Sep. 21, 2006

(54) Novel compositions and methods for cancer

(76) Inventors: Eric K. Engelhard, Davis, CA (US); David W. Morris, David, CA (US)

Correspondence Address: SAGRES DISCOVERY INC.;INTELLECTUAL PROPERTY - R440, P.O. BOX 8097, EMERYVILLE, CA, 94662-8097, US

(21) Appl. No.: 11/330,648

(22) Filed: Jan. 12, 2006

Related U.S. Application Data
(62) Division of application No. 10/004,113, filed on Oct. 23, 2001, now abandoned.
Application No. 10/004,113 is a continuation-in-part of application No. 09/747,377, filed on Dec. 22, 2000, now abandoned.
Application No. 10/004,113 is a continuation-in-part of application No. 09/798,586, filed on Mar. 2, 2001, now abandoned.

(51) Int. Cl. A61K 48/00; A61K 38/17; C12Q 1/68; A61K 39/395; G01N 33/574

(52) U.S. Cl. 435/6; 435/7.23; 424/155.1; 514/12; 514/44

(57) ABSTRACT

The present invention relates to novel sequences for use in diagnosis and treatment of carcinomas, especially lymphoma carcinomas. In addition, the present invention describes the use of novel compositions for use in screening methods.

[0001] The present application is a continuing application of U.S. Ser. No. 09/747,377, filed Dec. 22, 2000 and Ser. No. 09/798, 586. filed Mar. 2, 2001, both of which are expressly incorporated herein by reference.

### FIELD OF THE INVENTION

[0002] The present invention relates to novel sequences for use in diagnosis and treatment of cancer, especially carcinomas, as well as the use of the novel compositions in screening methods.

### BACKGROUND OF THE INVENTION

[0003] Oncogenes are genes that can cause cancer. Carcinogenesis can occur by a wide variety of mechanisms, including infection of cells by viruses containing oncogenes, activation of protooncogenes in the host genome, and mutations of protooncogenes and tumor suppressor genes.

[0004] There are a number of viruses known to be involved in human cancer as well as in animal cancer. Of particular interest here are viruses that do not contain oncogenes themselves; these are slow-transforming retroviruses. They induce tumors by integrating into the host genome and affecting neighboring protooncogenes in a variety of ways, including promoter insertion, enhancer insertion, and/or truncation of a protooncogene or tumor suppressor gene. The analysis of sequences at or near the insertion sites led to the identification of a number of new protooncogenes.

[0005] With respect to lymphoma and leukemia, murine leukemia retrovirus (MuLV), such as SL3-3 or Akv, is a potent inducer of tumors when inoculated into susceptible newborn mice, or when carried in the germline. A number of sequences have been identified as relevant in the induction of lymphoma and leukemia by analyzing the insertion sites; see Sorensen et al., J. of Virology 74:2161 (2000); Hansen et al., Genome Res. 10(2):237-43 (2000); Sorensen et al., J. Virology 70:4063 (1996); Sorensen et al., J. Virology 67:7118 (1993); Joosten et al., Virology 268:308 (2000); and Li et al., Nature Genetics 23:348 (1999); all of which are expressly incorporated by reference herein.

[0006] Accordingly, it is an object of the invention to provide sequences involved in cancer and in particular in oncogenesis.

### SUMMARY OF THE INVENTION

[0007] In accordance with the objects outlined above, the present invention provides methods for screening for compositions which modulate carcinomas, especially lymphoma and leukemia. Also provided herein are methods of inhibiting proliferation of a cell, preferably a lymphoma cell. Methods of treatment of carcinomas, including diagnosis, are also provided herein.

[0008] In one aspect, a method of screening drug candidates comprises providing a cell that expresses a carcinoma associated (CA) gene or fragments thereof. Preferred embodiments of CA genes are genes which are differentially expressed in cancer cells, preferably lymphatic, breast, prostate or epithelial cells, compared to other cells. Preferred embodiments of CA genes used in the methods herein include, but are not limited to the nucleic acids selected from Tables 1-10. The method further includes adding a drug candidate to the cell and determining the effect of the drug candidate on the expression of the CA gene.

[0009] In one embodiment, the method of screening drug candidates includes comparing the level of expression in the absence of the drug candidate to the level of expression in the presence of the drug candidate.

[0010] Also provided herein is a method of screening for a bioactive agent capable of binding to a CA protein (CAP), the method comprising combining the CAP and a candidate bioactive agent, and determining the binding of the candidate agent to the CAP.

[0011] Further provided herein is a method for screening for a bioactive agent capable of modulating the activity of a CAP. In one embodiment, the method comprises combining the CAP and a candidate bioactive agent, and determining the effect of the candidate agent on the bioactivity of the CAP.

[0012] Also provided is a method of evaluating the effect of a candidate carcinoma drug comprising administering the drug to a patient and removing a cell sample from the patient. The expression profile of the cell is then determined. This method may further comprise comparing the expression profile of the patient to an expression profile of a heathy individual.

[0013] In a further aspect, a method for inhibiting the activity of an CA protein is provided. In one embodiment, the method comprises administering to a patient an inhibitor of a CA protein preferably selected from the group consisting of the sequences outlined in Tables 1-10 or their complements.

[0014] A method of neutralizing the effect of a CA protein, preferably a protein encoded by a nucleic acid selected from the group of sequences outlined in Tables 1-10, is also provided. Preferably, the method comprises contacting an agent specific for said protein with said protein in an amount sufficient to effect neutralization.

[0015] Moreover, provided herein is a biochip comprising a nucleic acid segment which encodes a CA protein, preferably selected from the sequences outlined in Tables 1-10.

[0016] Also provided herein is a method for diagnosing or determining the propensity to carcinomas, especially lymphoma or leukemia by sequencing at least one carcinoma or lymphoma gene of an individual. In yet another aspect of the invention, a method is provided for determining carcinoma including lymphoma and leukemia gene copy number in an individual.

[0017] Novel sequences are also provided herein. Other aspects of the invention will become apparent to the skilled artisan by the following description of the invention.

### DETAILED DESCRIPTION OF THE INVENTION

[0018] The present invention is directed to a number of sequences associated with carcinomas, especially lymphoma, breast cancer or prostate cancer. The relatively tight linkage between clonally-integrated proviruses and protooncogenes forms “provirus tagging”, in which slow-transforming retroviruses that act by an insertion mutation mechanism are used to isolate protooncogenes. In some models, uninfected animals have low cancer rates, and infected animals have high cancer rates. It is known that many of the retroviruses involved do not carry transduced host protooncogenes or pathogenic trans-acting viral genes, and thus the cancer incidence must therefor be a direct consequence of proviral integration effects into host protooncogenes. Since proviral integration is random, rare integrants will “activate” host protooncogenes that provide a selective growth advantage, and these rare events result in new proviruses at clonal stoichiometries in tumors.

[0019] The use of oncogenic retroviruses, whose sequences insert into the genome of the host organism resulting in carcinoma, allows the identification of host sequences involved in carcinoma. These sequences may then be used in a number of different ways, including diagnosis, prognosis, screening for modulators (including both agonists and antagonists), antibody generation (for immunotherapy and imaging), etc. However, as will be appreciated by those in the art, oncogenes that are identified in one type of cancer such as lymphoma or leukemia have a strong likelihood of being involved in other types of cancers as well. Thus, while the sequences outlined herein are initially identified as correlated with lymphoma, they can also be found in other types of cancers as well, outlined below.

[0020] Accordingly, the present invention provides nucleic acid and protein sequences that are associated with carcinoma, herein termed “carcinoma associated” or “CA” sequences. In a preferred embodiment, the present invention provides nucleic acid and protein sequences that are associated with carcinomas which originate in lymphatic tissue, herein termed “lymphoma associated”, “leukemia associated” or “LA” sequences.

[0021] Suitable cancers which can be diagnosed or screened for using the methods of the present invention include cancers classified by site or by histological type. Cancers classified by site include cancer of the oral cavity and pharynx (lip, tongue, salivary gland, floor of mouth, gum and other mouth, nasopharynx, tonsil, oropharynx, hypopharynx, other oral/pharynx); cancers of the digestive system (esophagus; stomach; small intestine; colon and rectum; anus, anal canal, and anorectum; liver; intrahepatic bile duct; gallbladder; other biliary; pancreas; retroperitoneum; peritoneum, omentum, and mesentery; other digestive); cancers of the respiratory system (nasal cavity, middle ear, and sinuses; larynx; lung and bronchus; pleura; trachea, mediastinum, and other respiratory); cancers of the mesothelioma; bones and joints; and soft tissue, including heart; skin cancers, including melanomas and other non-epithelial skin cancers; Kaposi's sarcoma and breast cancer; cancer of the female genital system (cervix uteri; corpus uteri; uterus, nos; ovary; vagina; vulva; and other female genital); cancers of the male genital system (prostate gland; testis; penis; and other male genital); cancers of the urinary system (urinary bladder; kidney and renal pelvis; ureter; and other urinary); cancers of the eye and orbit; cancers of the brain and nervous system (brain; and other nervous system); cancers of the endocrine system (thyroid gland and other endocrine, including thymus); cancers of the lymphomas (hodgkin's disease and non-hodgkin's lymphoma), multiple myeloma, and leukemias (lymphocytic leukemia; myeloid leukemia; monocytic leukemia; and other leukemias).

[0022] Other cancers, classified by histological type, that may be associated with the sequences of the invention include, but are not limited to, Neoplasm, malignant; Carcinoma, NOS; Carcinoma, undifferentiated, NOS; Giant and spindle cell carcinoma; Small cell carcinoma, NOS; Papillary carcinoma, NOS; Squamous cell carcinoma, NOS; Lymphoepithelial carcinoma; Basal cell carcinoma, NOS; Pilomatrix carcinoma; Transitional cell carcinoma, NOS; Papillary transitional cell carcinoma; Adenocarcinoma, NOS; Gastrinoma, malignant; Cholangiocarcinoma; Hepatocellular carcinoma, NOS; Combined hepatocellular carcinoma and cholangiocarcinoma; Trabecular adenocarcinoma; Adenoid cystic carcinoma; Adenocarcinoma in adenomatous polyp; Adenocarcinoma, familial polyposis coli; Solid carcinoma, NOS; Carcinoid tumor, malignant; Branchiolo-alveolar adenocarcinoma; Papillary adenocarcinoma, NOS; Chromophobe carcinoma; Acidophil carcinoma; Oxyphilic adenocarcinoma; Basophil carcinoma; Clear cell adenocarcinoma, NOS; Granular cell carcinoma; Follicular adenocarcinoma, NOS; Papillary and follicular adenocarcinoma; Nonencapsulating sclerosing carcinoma; Adrenal cortical carcinoma; Endometroid carcinoma; Skin appendage carcinoma; Apocrine adenocarcinoma; Sebaceous adenocarcinoma; Ceruminous adenocarcinoma; Mucoepidermoid carcinoma; Cystadenocarcinoma, NOS; Papillary cystadenocarcinoma, NOS; Papillary serous cystadenocarcinoma; Mucinous cystadenocarcinoma, NOS; Mucinous adenocarcinoma; Signet ring cell carcinoma; Infiltrating duct carcinoma; Medullary carcinoma, NOS; Lobular carcinoma; Inflammatory carcinoma; Paget's disease, mammary; Acinar cell carcinoma; Adenosquamous carcinoma; Adenocarcinoma w/squamous metaplasia; Thymoma, malignant; Ovarian stromal tumor, malignant; Thecoma, malignant; Granulosa cell tumor, malignant; Androblastoma, malignant; Sertoli cell carcinoma; Leydig cell tumor, malignant; Lipid cell tumor, malignant; Paraganglioma, malignant; Extra-mammary paraganglioma, malignant; Pheochromocytoma; Giomangiosarcoma; Malignant melanoma, NOS; Amelanotic melanoma; Superficial spreading melanoma; Malig melanoma in giant pigmented nevus; Epithelioid cell melanoma; Blue nevus, malignant; Sarcoma, NOS; Fibrosarcoma, NOS; Fibrous histiocytoma, malignant; Myxosarcoma; Liposarcoma, NOS; Leiomyosarcoma, NOS; Rhabdomyosarcoma, NOS; Embryonal rhabdomyosarcoma; Alveolar rhabdomyosarcoma; Stromal sarcoma, NOS; Mixed tumor, malignant, NOS; Mullerian mixed tumor; Nephroblastoma; Hepatoblastoma; Carcinosarcoma, NOS; Mesenchymoma, malignant; Brenner tumor, malignant; Phyllodes tumor, malignant; Synovial sarcoma, NOS; Mesothelioma, malignant; Dysgerminoma; Embryonal carcinoma, NOS; Teratoma, malignant, NOS; Struma ovarii, malignant; Choriocarcinoma; Mesonephroma, malignant; Hemangiosarcoma; Hemangioendothelioma, malignant; Kaposi's sarcoma; Hemangiopericytoma, malignant; Lymphangiosarcoma; Osteosarcoma, NOS; Juxtacortical osteosarcoma; Chondrosarcoma, NOS; Chondroblastoma, malignant; Mesenchymal chondrosarcoma; Giant cell tumor of bone; Ewing's sarcoma; Odontogenic tumor, malignant; Ameloblastic odontosarcoma; Ameloblastoma, malignant; Ameloblastic fibrosarcoma; Pinealoma, malignant; Chordoma; Glioma, malignant; Ependymoma, NOS; Astrocytoma, NOS; Protoplasmic astrocytoma; Fibrillary astrocytoma; Astroblastoma; Glioblastoma, NOS; Oligodendroglioma, NOS; Oligodendroblastoma; Primitive neuroectodermal; Cerebellar sarcoma, NOS; Ganglioneuroblastoma; Neuroblastoma, NOS; Retinoblastoma, NOS; Olfactory neurogenic tumor; Meningioma, malignant; Neurofibrosarcoma; Neurilemmoma, malignant; Granular cell tumor, malignant; Malignant lymphoma, NOS; Hodgkin's disease, NOS; Hodgkin's; paragranuloma, NOS; Malignant lymphoma, small lymphocytic; Malignant lymphoma, large cell, diffuse; Malignant lymphoma, follicular, NOS; Mycosis fungoides; Other specified non-Hodgkin's lymphomas; Malignant histiocytosis; Multiple myeloma; Mast cell sarcoma; Immunoproliferative small intestinal disease; Leukemia, NOS; Lymphoid leukemia, NOS; Plasma cell leukemia; Erythroleukemia; Lymphosarcoma cell leukemia; Myeloid leukemia, NOS; Basophilic leukemia; Eosinophilic leukemia; Monocytic leukemia, NOS; Mast cell leukemia; Megakaryoblastic leukemia; Myeloid sarcoma; and Hairy cell leukemia.

[0023] Association in this context means that the nucleotide or protein sequences are either differentially expressed, activated, inactivated or altered in carcinomas as compared to normal tissue. As outlined below, CA sequences include those that are up-regulated (i.e. expressed at a higher level), as well as those that are down-regulated (i.e. expressed at a lower level), in carcinomas. CA sequences also include sequences which have been altered (i.e., truncated sequences or sequences with substitutions, deletions or insertions, including point mutations) and show either the same expression profile or an altered profile. In a preferred embodiment, the CA sequences are from humans; however, as will be appreciated by those in the art, CA sequences from other organisms may be useful in animal models of disease and drug evaluation; thus, other CA sequences are provided, from vertebrates, including mammals, including rodents (rats, mice, hamsters, guinea pigs, etc.), primates, farm animals (including sheep, goats, pigs, cows, horses, etc). In some cases, prokaryotic CA sequences may be useful. CA sequences from other organisms may be obtained using the techniques outlined below.

[0024] CA sequences can include both nucleic acid and amino acid sequences. In a preferred embodiment, the CA sequences are recombinant nucleic acids. By the term “recombinant nucleic acid” herein is meant nucleic acid, originally formed in vitro, in general, by the manipulation of nucleic acid by polymerases and endonucleases, in a form not normally found in nature. Thus an isolated nucleic acid, in a linear form, or an expression vector formed in vitro by ligating DNA molecules that are not normally joined, are both considered recombinant for the purposes of this invention. It is understood that once a recombinant nucleic acid is made and reintroduced into a host cell or organism, it will replicate non-recombinantly, i.e. using the in vivo cellular machinery of the host cell rather than in vitro manipulations; however, such nucleic acids, once produced recombinantly, although subsequently replicated non-recombinantly, are still considered recombinant for the purposes of the invention.

[0025] Similarly, a “recombinant protein” is a protein made using recombinant techniques, i.e. through the expression of a recombinant nucleic acid as depicted above. A recombinant protein is distinguished from naturally occurring protein by at least one or more characteristics. For example, the protein may be isolated or purified away from some or all of the proteins and compounds with which it is normally associated in its wild type host, and thus may be substantially pure. For example, an isolated protein is unaccompanied by at least some of the material with which it is normally associated in its natural state, preferably constituting at least about 0.5%, more preferably at least about 5% by weight of the total protein in a given sample. A substantially pure protein comprises at least about 75% by weight of the total protein, with at least about 80% being preferred, and at least about 90% being particularly preferred. The definition includes the production of an CA protein from one organism in a different organism or host cell. Alternatively, the protein may be made at a significantly higher concentration than is normally seen, through the use of an inducible promoter or high expression promoter, such that the protein is made at increased concentration levels. Alternatively, the protein may be in a form not normally found in nature, as in the addition of an epitope tag or amino acid substitutions, insertions and deletions, as discussed below.

[0026] In a preferred embodiment, the CA sequences are nucleic acids. As will be appreciated by those in the art and is more fully outlined below, CA sequences are useful in a variety of applications, including diagnostic applications, which will detect naturally occurring nucleic acids, as well as screening applications; for example, biochips comprising nucleic acid probes to the CA sequences can be generated. In the broadest sense, then, by “nucleic acid” or “oligonucleotide” or grammatical equivalents herein means at least two nucleotides covalently linked together. A nucleic acid of the present invention will generally contain phosphodiester bonds, although in some cases, as outlined below (for example in antisense applications or when a candidate agent is a nucleic acid), nucleic acid analogs may be used that have alternate backbones, comprising, for example, phosphoramidate (Beaucage et al., Tetrahedron 49(10):1925 (1993) and references therein; Letsinger, J. Org. Chem. 35:3800 (1970); Sprinzl et al., Eur. J. Biochem. 81:579 (1977); Letsinger et al., Nucl. Acids Res. 14:3487 (1986); Sawai et al, Chem. Lett. 805 (1984), Letsinger et al., J. Am. Chem. Soc. 110:4470 (1988); and Pauwels et al., Chemica Scripta 26:141 91986)), phosphorothioate (Mag et al., Nucleic Acids Res. 19:1437 (1991); and U.S. Pat. No. 5,644,048), phosphorodithioate (Briu et al., J. Am. Chem. Soc. 111:2321 (1989), O-methylphophoroamidite linkages (see Eckstein, Oligonucleotides and Analogues: A Practical Approach, Oxford University Press), and peptide nucleic acid backbones and linkages (see Egholm, J. Am. Chem. Soc. 114:1895 (1992); Meier et al., Chem. Int. Ed. Engl. 31:1008 (1992); Nielsen, Nature, 365:566 (1993); Carlsson et al., Nature 380:207 (1996), all of which are incorporated by reference). Other analog nucleic acids include those with positive backbones (Denpcy et al., Proc. Natl. Acad. Sci. USA 92:6097 (1995); non-ionic backbones (U.S. Pat. Nos. 5,386,023, 5,637,684, 5,602,240, 5,216,141 and 4,469,863; Kiedrowshi et al., Angew. Chem. Intl. Ed. English 30:423 (1991); Letsinger et al., J. Am. Chem. Soc. 110:4470 (1988); Letsinger et al., Nucleoside & Nucleotide 13:1597 (1994); Chapters 2 and 3, ASC Symposium Series 580, “Carbohydrate Modifications in Antisense Research”, Ed. Y. S. Sanghui and P. Dan Cook; Mesmaeker et al., Bioorganic & Medicinal Chem. Lett. 4:395 (1994); Jeffs et al., J. Biomolecular NMR 34:17 (1994); Tetrahedron Lett. 37:743 (1996)) and non-ribose backbones, including those described in U.S. Pat. Nos. 5,235,033 and 5,034,506, and Chapters 6 and 7, ASC Symposium Series 580, “Carbohydrate Modifications in Antisense Research”, Ed. Y. S. Sanghui and P. Dan Cook. Nucleic acids containing one or more carbocyclic sugars are also included within one definition of nucleic acids (see Jenkins et al., Chem. Soc. Rev. (1995) pp 169-176). Several nucleic acid analogs are described in Rawls, C & E News Jun. 2, 1997 page 35. All of these references are hereby expressly incorporated by reference. These modifications of the ribose-phosphate backbone may be done for a variety of reasons, for example to increase the stability and half-life of such molecules in physiological environments for use in anti-sense applications or as probes on a biochip.

[0027] As will be appreciated by those in the art, all of these nucleic acid analogs may find use in the present invention. In addition, mixtures of naturally occurring nucleic acids and analogs can be made; alternatively, mixtures of different nucleic acid analogs, and mixtures of naturally occurring nucleic acids and analogs may be made.

[0028] The nucleic acids may be single stranded or double stranded, as specified, or contain portions of both double stranded or single stranded sequence. As will be appreciated by those in the art, the depiction of a single strand “Watson” also defines the sequence of the other strand “Crick”; thus the sequences described herein also includes the complement of the sequence. The nucleic acid may be DNA, both genomic and cDNA, RNA or a hybrid, where the nucleic acid contains any combination of deoxyribo- and ribo-nucleotides, and any combination of bases, including uracil, adenine, thymine, cytosine, guanine, inosine, xanthine hypoxanthine, isocytosine, isoguanine, etc. As used herein, the term “nucleoside” includes nucleotides and nucleoside and nucleotide analogs, and modified nucleosides such as amino modified nucleosides. In addition, “nucleoside” includes non-naturally occurring analog structures. Thus for example the individual units of a peptide nucleic acid, each containing a base, are referred to herein as a nucleoside.

[0029] An CA sequence can be initially identified by substantial nucleic acid and/or amino acid sequence homology to the CA sequences outlined herein. Such homology can be based upon the overall nucleic acid or amino acid sequence, and is generally determined as outlined below, using either homology programs or hybridization conditions.

[0030] The CA sequences of the invention were initially identified as described herein; basically, infection of mice with murine leukemia viruses (MLV) resulted in lymphoma, although many of these sequences will also be involved in other cancers as is generally outlined herein.

[0031] The CA sequences outlined herein comprise the insertion sites for the virus. In general, the retrovirus can cause carcinomas in three basic ways: first of all, by inserting upstream of a normally silent host gene and activating it (e.g. promoter insertion); secondly, by truncating a host gene that leads to oncogenesis; or by enhancing the transcription of a neighboring gene. For example, retrovirus enhancers, including SL3-3, are known to act on genes up to approximately 200 kilobases of the insertion site.

[0032] In a preferred embodiment, CA sequences are those that are up-regulated in carcinomas; that is, the expression of these genes is higher in carcinoma tissue as compared to normal tissue of the same differentiation stage. “Up-regulation” as used herein means at least about 50%, more preferably at least about 100%, more preferably at least about 150%, more preferably, at least about 200%, with from 300 to at least 1000% being especially preferred.

[0033] In a preferred embodiment, CA sequences are those that are down-regulated in carcinomas; that is, the expression of these genes is lower in carcinoma tissue as compared to normal I tissue of the same differentiation stage. “Down-regulation” as used herein means at least about 50%, more preferably at least about 100%, more preferably at least about 150%, more preferably, at least about 200%, with from 300 to at least 1000% being especially preferred.

[0034] In a preferred embodiment, CA sequences are those that are altered but show either the same expression profile or an altered profile as compared to normal lymphoid tissue of the same differentiation stage. “Altered CA sequences” as used herein refers to sequences which are truncated, contain insertions or contain point mutations.

[0035] CA proteins of the present invention may be classified as secreted proteins, transmembrane proteins or intracellular proteins.

[0036] In a preferred embodiment the CA protein is an intracellular protein. Intracellular proteins may be found in the cytoplasm and/or in the nucleus. Intracellular proteins are involved in all aspects of cellular function and replication (including, for example, signaling pathways); aberrant expression of such proteins results in unregulated or disregulated cellular processes. For example, many intracellular proteins have enzymatic activity such as protein kinase activity, protein phosphatase activity, protease activity, nucleotide cyclase activity, polymerase activity and the like. Intracellular proteins also serve as docking proteins that are involved in organizing complexes of proteins, or targeting proteins to various subcellular localizations, and are involved in maintaining the structural integrity of organelles.

[0037] An increasingly appreciated concept in characterizing intracellular proteins is the presence in the proteins of one or more motifs for which defined functions have been attributed. In addition to the highly conserved sequences found in the enzymatic domain of proteins, highly conserved sequences have been identified in proteins that are involved in protein-protein interaction. For example, Src-homology-2 (SH2) domains bind tyrosine-phosphorylated targets in a sequence dependent manner. PTB domains, which are distinct from SH2 domains, also bind tyrosine phosphorylated targets. SH3 domains bind to proline-rich targets. In addition, PH domains, tetratricopeptide repeats and WD domains to name only a few, have been shown to mediate protein-protein interactions. Some of these may also be involved in binding to phospholipids or other second messengers. As will be appreciated by one of ordinary skill in the art, these motifs can be identified on the basis of primary sequence; thus, an analysis of the sequence of proteins may provide insight into both the enzymatic potential of the molecule and/or molecules with which the protein may associate.

[0038] In a preferred embodiment, the CA sequences are transmembrane proteins. Transmembrane proteins are molecules that span the phospholipid bilayer of a cell. They may have an intracellular domain, an extracellular domain, or both. The intracellular domains of such proteins may have a number of functions including those already described for intracellular proteins. For example, the intracellular domain may have enzymatic activity and/or may serve as a binding site for additional proteins. Frequently the intracellular domain of transmembrane proteins serves both roles. For example certain receptor tyrosine kinases have both protein kinase activity and SH2 domains. In addition, autophosphorylation of tyrosines on the receptor molecule itself, creates binding sites for additional SH2 domain containing proteins.

[0039] Transmembrane proteins may contain from one to many transmembrane domains. For example, receptor tyrosine kinases, certain cytokine receptors, receptor guanylyl cyclases and receptor serine/threonine protein kinases contain a single transmembrane domain. However, various other proteins including channels and adenylyl cyclases contain numerous transmembrane domains. Many important cell surface receptors are classified as “seven transmembrane domain” proteins, as they contain 7 membrane spanning regions. Important transmembrane protein receptors include, but are not limited to insulin receptor, insulin-like growth factor receptor, human growth hormone receptor, glucose transporters, transferrin receptor, epidermal growth factor receptor, low density lipoprotein receptor, epidermal growth factor receptor, leptin receptor, interleukin receptors, e.g. IL-1 receptor, IL-2 receptor, etc.

[0040] Characteristics of transmembrane domains include approximately 20 consecutive hydrophobic amino acids that may be followed by charged amino acids. Therefore, upon analysis of the amino acid sequence of a particular protein, the localization and number of transmembrane domains within the protein may be predicted.

[0041] The extracellular domains of transmembrane proteins are diverse; however, conserved motifs are found repeatedly among various extracellular domains. Conserved structure and/or functions have been ascribed to different extracellular motifs. For example, cytokine receptors are characterized by a cluster of cysteines and a WSXWS (W=tryptophan, S=serine, X=any amino acid) motif. Immunoglobulin-like domains are highly conserved. Mucin-like domains may be involved in cell adhesion and leucine-rich repeats participate in protein-protein interactions.

[0042] Many extracellular domains are involved in binding to other molecules. In one aspect, extracellular domains are receptors. Factors that bind the receptor domain include circulating ligands, which may be peptides, proteins, or small molecules such as adenosine and the like. For example, growth factors such as EGF, FGF and PDGF are circulating growth factors that bind to their cognate receptors to initiate a variety of cellular responses. Other factors include cytokines, mitogenic factors, neurotrophic factors and the like. Extracellular domains also bind to cell-associated molecules. In this respect, they mediate cell-cell interactions. Cell-associated ligands can be tethered to the cell for example via a glycosylphosphatidylinositol (GPI) anchor, or may themselves be transmembrane proteins. Extracellular domains also associate with the extracellular matrix and contribute to the maintenance of the cell structure.

[0043] CA proteins that are transmembrane are particularly preferred in the present invention as they are good targets for immunotherapeutics, as are described herein. In addition, as outlined below, transmembrane proteins can be also useful in imaging modalities.

[0044] It will also be appreciated by those in the art that a transmembrane protein can be made soluble by removing transmembrane sequences, for example through recombinant methods. Furthermore, transmembrane proteins that have been made soluble can be made to be secreted through recombinant means by adding an appropriate signal sequence.

[0045] In a preferred embodiment, the CA proteins are secreted proteins; the secretion of which can be either constitutive or regulated. These proteins have a signal peptide or signal sequence that targets the molecule to the secretory pathway. Secreted proteins are involved in numerous physiological events; by virtue of their circulating nature, they serve to transmit signals to various other cell types. The secreted protein may function in an autocrine manner (acting on the cell that secreted the factor), a paracrine manner (acting on cells in close proximity to the cell that secreted the factor) or an endocrine manner (acting on cells at a distance). Thus secreted molecules find use in modulating or altering numerous aspects of physiology. CA proteins that are secreted proteins are particularly preferred in the present invention as they serve as good targets for diagnostic markers, for example for blood tests.

[0046] An CA sequence is initially identified by substantial nucleic acid and/or amino acid sequence homology to the CA sequences outlined herein. Such homology can be based upon the overall nucleic acid or amino acid sequence, and is generally determined as outlined below, using either homology programs or hybridization conditions.

[0047] As used herein, a nucleic acid is a “CA nucleic acid” if the overall homology of the nucleic acid sequence to one of the nucleic acids of Tables 1-10 is preferably greater than about 75%, more preferably greater than about 80%, even more preferably greater than about 85% and most preferably greater than 90%. In some embodiments the homology will be as high as about 93 to 95 or 98%. In a preferred embodiment, the sequences which are used to determine sequence identity or similarity are selected from those of the nucleic acids of Tables 1-10. In another embodiment, the sequences are naturally occurring allelic variants of the sequences of the nucleic acids of Tables 1-10. In another embodiment, the sequences are sequence variants as further described herein.

[0048] Homology in this context means sequence similarity or identity, with identity being preferred. A preferred comparison for homology purposes is to compare the sequence containing sequencing errors to the correct sequence. This homology will be determined using standard techniques known in the art, including, but not limited to, the local homology algorithm of Smith & Waterman, Adv. Appl. Math. 2:482 (1981), by the homology alignment algorithm of Needleman & Wunsch, J. Mol. Biol. 48:443 (1970), by the search for similarity method of Pearson & Lipman, PNAS USA 85:2444 (1988), by computerized implementations of these algorithms (GAP, BESTFIT, FASTA, and TFASTA in the Wisconsin Genetics Software Package, Genetics Computer Group, 575 Science Drive, Madison, Wis.), the Best Fit sequence program described by Devereux et al., Nucl. Acid Res. 12:387-395 (1984), preferably using the default settings, or by inspection.

[0049] One example of a useful algorithm is PILEUP. PILEUP creates a multiple sequence alignment from a group of related sequences using progressive, pairwise alignments. It can also plot a tree showing the clustering relationships used to create the alignment. PILEUP uses a simplification of the progressive alignment method of Feng & Doolittle, J. Mol. Evol. 35:351-360 (1987); the method is similar to that described by Higgins & Sharp CABIOS 5:151-153 (1989). Useful PILEUP parameters including a default gap weight of 3.00, a default gap length weight of 0.10, and weighted end gaps.

[0050] Another example of a useful algorithm is the BLAST algorithm, described in Altschul et al., J. Mol. Biol. 215, 403-410, (1990) and Karlin et al., PNAS USA 90:5873-5787 (1993). A particularly useful BLAST program is the WU-BLAST-2 program which was obtained from Altschul et al., Methods in Enzymology, 266: 460-480 (1996); http:/Hblast.wustl]. WU-BLAST-2 uses several search parameters, most of which are set to the default values. The adjustable parameters are set with the following values: overlap span=1, overlap fraction=0.125, word threshold (T) =11. The HSP S and HSP S2 parameters are dynamic values and are established by the program itself depending upon the composition of the particular sequence and composition of the particular database against which the sequence of interest is being searched; however, the values may be adjusted to increase sensitivity. A % amino acid sequence identity value is determined by the number of matching identical residues divided by the total number of residues of the “longer” sequence in the aligned region. The “longer” sequence is the one having the most actual residues in the aligned region (gaps introduced by WU-Blast-2 to maximize the alignment score are ignored).

[0051] Thus, “percent (%) nucleic acid sequence identity” is defined as the percentage of nucleotide residues in a candidate sequence that are identical with the nucleotide residues of the nucleic acids of Tables 1-10. A preferred method utilizes the BLASTN module of WU-BLAST-2 set to the default parameters, with overlap span and overlap fraction set to 1 and 0.125, respectively.

[0052] The alignment may include the introduction of gaps in the sequences to be aligned. In addition, for sequences which contain either more or fewer nucleotides than those of the nucleic acids of Tables 1-10, it is understood that the percentage of homology will be determined based on the number of homologous nucleosides in relation to the total number of nucleosides. Thus, for example, homology of sequences shorter than those of the sequences identified herein and as discussed below, will be determined using the number of nucleosides in the shorter sequence.

[0053] In one embodiment, the nucleic acid homology is determined through hybridization studies. Thus, for example, nucleic acids which hybridize under high stringency to the nucleic acids identified in the figures, or their complements, are considered CA sequences. High stringency conditions are known in the art; see for example Maniatis et al., Molecular Cloning: A Laboratory Manual, 2d Edition, 1989, and Short Protocols in Molecular Biology, ed. Ausubel, et al., both of which are hereby incorporated by reference. Stringent conditions are sequence-dependent and will be different in different circumstances. Longer sequences hybridize specifically at higher temperatures. An extensive guide to the hybridization of nucleic acids is found in Tijssen, Techniques in Biochemistry and Molecular Biology-Hybridization with Nucleic Acid Probes, “Overview of principles of hybridization and the strategy of nucleic acid assays” (1993). Generally, stringent conditions are selected to be about 5-10° C. lower than the thermal melting point (Tm) for the specific sequence at a defined ionic strength pH. The Tm is the temperature (under defined ionic strength, pH and nucleic acid concentration) at which 50% of the probes complementary to the target hybridize to the target sequence at equilibrium (as the target sequences are present in excess, at Tm, 50% of the probes are occupied at equilibrium). Stringent conditions will be those in which the salt concentration is less than about 1.0 M sodium ion, typically about 0.01 to 1.0 M sodium ion concentration (or other salts) at pH 7.0 to 8.3 and the temperature is at least about 30° C. for short probes. (e.g. 10 to 50 nucleotides) and at least about 60° C. for long probes (e.g. greater than 50 nucleotides). Stringent conditions may also be achieved with the addition of destabilizing agents such as formamide.

[0054] In another embodiment, less stringent hybridization conditions are used; for example, moderate or low stringency conditions may be used, as are known in the art; see Maniatis and Ausubel, supra, and Tijssen, supra.

[0055] In addition, the CA nucleic acid sequences of the invention are fragments of larger genes, i.e. they are nucleic acid segments. Alternatively, the CA nucleic acid sequences can serve as indicators of oncogene position, for example, the CA sequence may be an enhancer that activates a protooncogene. “Genes” in this context includes coding regions, non-coding regions, and mixtures of coding and non-coding regions. Accordingly, as will be appreciated by those in the art, using the sequences provided herein, additional sequences of the CA genes can be obtained, using techniques well known in the art for cloning either longer sequences or the full length sequences; see Maniatis et al., and Ausubel, et al., supra, hereby expressly incorporated by reference. In general, this is done using PCR, for example, kinetic PCR.

[0056] Once the CA nucleic acid is identified, it can be cloned and, if necessary, its constituent parts recombined to form the entire CA nucleic acid. Once isolated from its natural source, e.g., contained within a plasmid or other vector or excised therefrom as a linear nucleic acid segment, the recombinant CA nucleic acid can be further used as a probe to identify and isolate other CA nucleic acids, for example additional coding regions. It can also be used as a “precursor” nucleic acid to make modified or variant CA nucleic acids and proteins.

[0057] The CA nucleic acids of the present invention are used in several ways. In a first embodiment, nucleic acid probes to the CA nucleic acids are made and attached to biochips to be used in screening and diagnostic methods, as outlined below, or for administration, for example for gene therapy and/or antisense applications. Alternatively, the CA nucleic acids that include coding regions of CA proteins can be put into expression vectors for the expression of CA proteins, again either for screening purposes or for administration to a patient.

[0058] In a preferred embodiment, nucleic acid probes to CA nucleic acids (both the nucleic acid sequences outlined in the figures and/or the complements thereof) are made. The nucleic acid probes attached to the biochip are designed to be substantially complementary to the CA nucleic acids, i.e. the target sequence (either the target sequence of the sample or to other probe sequences, for example in sandwich assays), such that hybridization of the target sequence and the probes of the present invention occurs. As outlined below, this complementarity need not be perfect; there may be any number of base pair mismatches which will interfere with hybridization between the target sequence and the single stranded nucleic acids of the present invention. However, if the number of mutations is so great that no hybridization can occur under even the least stringent of hybridization conditions, the sequence is not a complementary target sequence. Thus, by “substantially complementary” herein is meant that the probes are sufficiently complementary to the target sequences to hybridize under normal reaction conditions, particularly high stringency conditions, as outlined herein.

[0059] A nucleic acid probe is generally single stranded but can be partially single and partially double stranded. The strandedness of the probe is dictated by the structure, composition, and properties of the target sequence. In general, the nucleic acid probes range from about 8 to about 100 bases long, with from about 10 to about 80 bases being preferred, and from about 30 to about 50 bases being particularly preferred. That is, generally whole genes are not used. In some embodiments, much longer nucleic acids can be used, up to hundreds of bases.

[0060] In a preferred embodiment, more than one probe per sequence is used, with either overlapping probes or probes to different sections of the target being used. That is, two, three, four or more probes, with three being preferred, are used to build in a redundancy for a particular target. The probes can be overlapping (i.e. have some sequence in common), or separate.

[0061] As will be appreciated by those in the art, nucleic acids can be attached or immobilized to a solid support in a wide variety of ways. By “immobilized” and grammatical equivalents herein is meant the association or binding between the nucleic acid probe and the solid support is sufficient to be stable under the conditions of binding, washing, analysis, and removal as outlined below. The binding can be covalent or non-covalent. By “non-covalent binding” and grammatical equivalents herein is meant one or more of either electrostatic, hydrophilic, and hydrophobic interactions. Included in non-covalent binding is the covalent attachment of a molecule, such as, streptavidin to the support and the non-covalent binding of the biotinylated probe to the streptavidin. By “covalent binding” and grammatical equivalents herein is meant that the two moieties, the solid support and the probe, are attached by at least one bond, including sigma bonds, pi bonds and coordination bonds. Covalent bonds can be formed directly between the probe and the solid support or can be formed by a cross linker or by inclusion of a specific reactive group on either the solid support or the probe or both molecules. Immobilization may also involve a combination of covalent and non-covalent interactions.

[0062] In general, the probes are attached to the biochip in a wide variety of ways, as will be appreciated by those in the art. As described herein, the nucleic acids can either be synthesized first, with subsequent attachment to the biochip, or can be directly synthesized on the biochip.

[0063] The biochip comprises a suitable solid substrate. By “substrate” or “solid support” or other grammatical equivalents herein is meant any material that can be modified to contain discrete individual sites appropriate for the attachment or association of the nucleic acid probes and is amenable to at least one detection method. As will be appreciated by those in the art, the number of possible substrates are very large, and include, but are not limited to, glass and modified or functionalized glass, plastics (including acrylics, polystyrene and copolymers of styrene and other materials, polypropylene, polyethylene, polybutylene, polyurethanes, Teflon™, etc.), polysaccharides, nylon or nitrocellulose, resins, silica or silica-based materials including silicon and modified silicon, carbon, metals, inorganic glasses, etc. In general, the substrates allow optical detection and do not appreciably fluoresce.

[0064] In a preferred embodiment, the surface of the biochip and the probe may be derivatized with chemical functional groups for subsequent attachment of the two. Thus, for example, the biochip is derivatized with a chemical functional group including, but not limited to, amino groups, carboxy groups, oxo groups and thiol groups, with amino groups being particularly preferred. Using these functional groups, the probes can be attached using functional groups on the probes. For example, nucleic acids containing amino groups can be attached to surfaces comprising amino groups, for example using linkers as are known in the art; for example, homo-or hetero-bifunctional linkers as are well known (see 1994 Pierce Chemical Company catalog, technical section on cross-linkers, pages 155-200, incorporated herein by reference). In addition, in some cases, additional linkers, such as alkyl groups (including substituted and heteroalkyl groups) may be used.

[0065] In this embodiment, the oligonucleotides are synthesized as is known in the art, and then attached to the surface of the solid support. As will be appreciated by those skilled in the art, either the 5′ or 3′ terminus may be attached to the solid support, or attachment may be via an internal nucleoside.

[0066] In an additional embodiment, the immobilization to the solid support may be very strong, yet non-covalent. For example, biotinylated oligonucleotides can be made, which bind to surfaces covalently coated with streptavidin, resulting in attachment.

[0067] Alternatively, the oligonucleotides may be synthesized on the surface, as is known in the art. For example, photoactivation techniques utilizing photopolymerization compounds and techniques are used. In a preferred embodiment, the nucleic acids can be synthesized in situ, using well known photolithographic techniques, such as those described in WO 95/25116; WO 95/35505; U.S. Pat. Nos. 5,700,637 and 5,445,934; and references cited within, all of which are expressly incorporated by reference; these methods of attachment form the basis of the Affymetrix GeneChip technology.

[0068] In addition to the solid-phase technology represented by biochip arrays, gene expression can also be quantified using liquid-phase arrays. One such system is kinetic polymerase chain reaction (PCR). Kinetic PCR allows for the simultaneous amplification and quantification of specific nucleic acid sequences. The specificity is derived from synthetic oligonucleotide primers designed to preferentially adhere to single-stranded nucleic acid sequences bracketing the target site. This pair of oligonucleotide primers form specific, non-covalently bound complexes on each strand of the target sequence. These complexes facilitate in vitro transcription of double-stranded DNA in opposite orientations. Temperature cycling of the reaction mixture creates a continuous cycle of primer binding, transcription, and re-melting of the nucleic acid to individual strands. The result is an exponential increase of the target dsDNA product. This product can be quantified in real time either through the use of an intercalating dye or a sequence specific probe. SYBR® Greene I, is an example of an intercalating dye, that preferentially binds to dsDNA resulting in a concomitant increase in the fluorescent signal. Sequence specific probes, such as used with TaqMan® technology, consist of a fluorochrome and a quenching molecule covalently bound to opposite ends of an oligonucleotide. The probe is designed to selectively bind the target DNA sequence between the two primers. When the DNA strands are synthesized during the PCR reaction, the fluorochrome is cleaved from the probe by the exonuclease activity of the polymerase resulting in signal dequenching. The probe signaling method can be more specific than the intercalating dye method, but in each case, signal strength is proportional to the dsDNA product produced. Each type of quantification method can be used in multi-well liquid phase arrays with each well representing primers and/or probes specific to nucleic acid sequences of interest. When used with messenger RNA preparations of tissues or cell lines, and an array of probe/primer reactions can simultaneously quantify the expression of multiple gene products of interest. See Germer, S., et al., Genome Res. 10:258-266 (2000); Heid, C. A., et al., Genome Res. 6, 986-994 (1996).

[0069] In a preferred embodiment, CA nucleic acids encoding CA proteins are used to make a variety of expression vectors to express CA proteins which can then be used in screening assays, as described below. The expression vectors may be either self-replicating extrachromosomal vectors or vectors which integrate into a host genome. Generally, these expression vectors include transcriptional and translational regulatory nucleic acid operably linked to the nucleic acid encoding the CA protein. The term “control sequences” refers to DNA sequences necessary for the expression of an operably linked coding sequence in a particular host organism. The control sequences that are suitable for prokaryotes, for example, include a promoter, optionally an operator sequence, and a ribosome binding site. Eukaryotic cells are known to utilize promoters, polyadenylation signals, and enhancers.

[0070] Nucleic acid is “operably linked” when it is placed into a functional relationship with another nucleic acid sequence. For example, DNA for a presequence or secretory leader is operably linked to DNA for a polypeptide if it is expressed as a preprotein that participates in the secretion of the polypeptide; a promoter or enhancer is operably linked to a coding sequence if it affects the transcription of the sequence; or a ribosome binding site is operably linked to a coding sequence if it is positioned so as to facilitate translation. Generally, “operably linked” means that the DNA sequences being linked are contiguous, and, in the case of a secretory leader, contiguous and in reading phase. However, enhancers do not have to be contiguous. Linking is accomplished by ligation at convenient restriction sites. If such sites do not exist, synthetic oligonucleotide adaptors or linkers are used in accordance with conventional practice. The transcriptional and translational regulatory nucleic acid will generally be appropriate to the host cell used to express the CA protein; for example, transcriptional and translational regulatory nucleic acid sequences from Bacillus are preferably used to express the CA protein in Bacillus. Numerous types of appropriate expression vectors, and suitable regulatory sequences are known in the art for a variety of host cells.

[0071] In general, the transcriptional and translational regulatory sequences may include, but are not limited to, promoter sequences, ribosomal binding sites, transcriptional start and stop sequences, translational start and stop sequences, and enhancer or activator sequences. In a preferred embodiment, the regulatory sequences include a promoter and transcriptional start and stop sequences.

[0072] Promoter sequences encode either constitutive or inducible promoters. The promoters may be either naturally occurring promoters or hybrid promoters. Hybrid promoters, which combine elements of more than one promoter, are also known in the art, and are useful in the present invention.

[0073] In addition, the expression vector may comprise additional elements. For example, the expression vector may have two replication systems, thus allowing it to be maintained in two organisms, for example in mammalian or insect cells for expression and in a procaryotic host for cloning and amplification. Furthermore, for integrating expression vectors, the expression vector contains at least one sequence homologous to the host cell genome, and preferably two homologous sequences which flank the expression construct. The integrating vector may be directed to a specific locus in the host cell by selecting the appropriate homologous sequence for inclusion in the vector. Constructs for integrating vectors are well known in the art.

[0074] In addition, in a preferred embodiment, the expression vector contains a selectable marker gene to allow the selection of transformed host cells. Selection genes are well known in the art and will vary with the host cell used.

[0075] The CA proteins of the present invention are produced by culturing a host cell transformed with an expression vector containing nucleic acid encoding an CA protein, under the appropriate conditions to induce or cause expression of the CA protein. The conditions appropriate for CA protein expression will vary with the choice of the expression vector and the host cell, and will be easily ascertained by one skilled in the art through routine experimentation. For example, the use of constitutive promoters in the expression vector will require optimizing the growth and proliferation of the host cell, while the use of an inducible promoter requires the appropriate growth conditions for induction. In addition, in some embodiments, the timing of the harvest is important. For example, the baculoviral systems used in insect cell expression are lytic viruses, and thus harvest time selection can be crucial for product yield.

[0076] Appropriate host cells include yeast, bacteria, archaebacteria, fungi, and insect, plant and animal cells, including mammalian cells. Of particular interest are Drosophila melahogaster cells, Saccharomyces cerevisiae and other yeasts, E. coli, Bacillus subtilis, Sf9 cells, C129 cells, 293 cells, Neurospora, BHK, CHO, COS, HeLa cells, THP1 cell line (a macrophage cell line) and human cells and cell lines.

[0077] In a preferred embodiment, the CA proteins are expressed in mammalian cells. Mammalian expression systems are also known in the art, and include retroviral systems. A preferred expression vector system is a retroviral vector system such as is generally described in PCT/US97/01019 and PCT/US97/01048, both of which are hereby expressly incorporated by reference. Of particular use as mammalian promoters are the promoters from mammalian viral genes, since the viral genes are often highly expressed and have a broad host range. Examples include the SV40 early promoter, mouse mammary tumor virus LTR promoter, adenovirus major late promoter, herpes simplex virus promoter, and the CMV promoter. Typically, transcription termination and polyadenylation sequences recognized by mammalian cells are regulatory regions located 3′ to the translation stop codon and thus, together with the promoter elements, flank the coding sequence. Examples of transcription terminator and polyadenlytion signals include those derived form SV40.

[0078] The methods of introducing exogenous nucleic acid into mammalian hosts, as well as other hosts, is well known in the art, and will vary with the host cell used. Techniques include dextran-mediated transfection, calcium phosphate precipitation, polybrene mediated transfection, protoplast fusion, electroporation, viral infection, encapsulation of the polynucleotide(s) in liposomes, and direct microinjection of the DNA into nuclei.

[0079] In a preferred embodiment, CA proteins are expressed in bacterial systems. Bacterial expression systems are well known in the art. Promoters from bacteriophage may also be used and are known in the art. In addition, synthetic promoters and hybrid promoters are also useful; for example, the tac promoter is a hybrid of the trp and lac promoter sequences. Furthermore, a bacterial promoter can include naturally occurring promoters of non-bacterial origin that have the ability to bind bacterial RNA polymerase and initiate transcription. In addition to a functioning promoter sequence, an efficient ribosome binding site is desirable. The expression vector may also include a signal peptide sequence that provides for secretion of the CA protein in bacteria. The protein is either secreted into the growth media (gram-positive bacteria) or into the periplasmic space, located between the inner and outer membrane of the cell (gram-negative bacteria). The bacterial expression vector may also include a selectable marker gene to allow for the selection of bacterial strains that have been transformed. Suitable selection genes include genes which render the bacteria resistant to drugs such as ampicillin, chloramphenicol, erythromycin, kanamycin, neomycin and tetracycline. Selectable markers also include biosynthetic genes, such as those in the histidine, tryptophan and leucine biosynthetic pathways. These components are assembled into expression vectors. Expression vectors for bacteria are well known in the art, and include vectors for Bacillus subtilis, E. coli, Streptococcus cremoris, and Streptococcus lividans, among others. The bacterial expression vectors are transformed into bacterial host cells using techniques well known in the art, such as calcium chloride treatment, electroporation, and others.

[0080] In one embodiment, CA proteins are produced in insect cells. Expression vectors for the transformation of insect cells, and in particular, baculovirus-based expression vectors, are well known in the art.

[0081] In a preferred embodiment, CA protein is produced in yeast cells. Yeast expression systems are well known in the art, and include expression vectors for Saccharomyces cerevisiae, Candida albicans and C. maltosa, Hansenula polymorpha, Kluyveromyces fragilis and K. lactis, Pichia guillerimondii and P. pastoris, Schizosaccharomyces pombe, and Yarrowia lipolytica.

[0082] The CA protein may also be made as a fusion protein, using techniques well known in the art. Thus, for example, for the creation of monoclonal antibodies. If the desired epitope is small, the CA protein may be fused to a carrier protein to form an immunogen. Alternatively, the CA protein may be made as a fusion protein to increase expression, or for other reasons. For example, when the CA protein is an CA peptide, the nucleic acid encoding the peptide may be linked to other nucleic acid for expression purposes.

[0083] In one embodiment, the CA nucleic acids, proteins and antibodies of the invention are labeled. By “labeled” herein is meant that a compound has at least one element, isotope or chemical compound attached to enable the detection of the compound. In general, labels fall into three classes: a) isotopic labels, which may be radioactive or heavy isotopes; b) immune labels, which may be antibodies or antigens; and c) colored or fluorescent dyes. The labels may be incorporated into the CA nucleic acids, proteins and antibodies at any position. For example, the label should be capable of producing, either directly or indirectly, a detectable signal. The detectable moiety may be a radioisotope, such as ³H, ¹⁴C, ³²P, ³⁵S, or ¹²⁵I, a fluorescent or chemiluminescent compound, such as fluorescein isothiocyanate, rhodamine, or luciferin, or an enzyme, such as alkaline phosphatase, beta-galactosidase or horseradish peroxidase. Any method known in the art for conjugating the antibody to the label may be employed, including those methods described by Hunter et al., Nature, 144:945 (1962); David et al., Biochemistry, 13:1014 (1974); Pain et al., J. Immunol. Meth., 40:219 (1981); and Nygren, J. Histochem. and Cytochem., 30:407 (1982).

[0084] Accordingly, the present invention also provides CA protein sequences. An CA protein of the present invention may be identified in several ways. “Protein” in this sense includes proteins, polypeptides, and peptides. As will be appreciated by those in the art, the nucleic acid sequences of the invention can be used to generate protein sequences. There are a variety of ways to do this, including cloning the entire gene and verifying its frame and amino acid sequence, or by comparing it to known sequences to search for homology to provide a frame, assuming the CA protein has homology to some protein in the database being used. Generally, the nucleic acid sequences are input into a program that will search all three frames for homology. This is done in a preferred embodiment using the following NCBI Advanced BLAST parameters. The program is blastx or blastn. The database is nr. The input data is as “Sequence in FASTA format”. The organism list is “none”. The “expect” is 10; the filter is default. The “descriptions” is 500, the “alignments” is 500, and the “alignment view” is pairwise. The “query Genetic Codes” is standard (1). The matrix is BLOSUM62; gap existence cost is 11, per residue gap cost is 1; and the lambda ratio is 0.85 default. This results in the generation of a putative protein sequence.

[0085] Also included within one embodiment of CA proteins are amino acid variants of the naturally occurring sequences, as determined herein. Preferably, the variants are preferably greater than about 75% homologous to the wild-type sequence, more preferably greater than about 80%, even more preferably greater than about 85% and most preferably greater than 90%. In some embodiments the homology will be as high as about 93 to 95 or 98%. As for nucleic acids, homology in this context means sequence similarity or identity, with identity being preferred. This homology will be determined using standard techniques known in the art as are outlined above for the nucleic acid homologies.

[0086] CA proteins of the present invention may be shorter or longer than the wild type amino acid sequences. Thus, in a preferred embodiment, included within the definition of CA proteins are portions or fragments of the wild type sequences herein. In addition, as outlined above, the CA nucleic acids of the invention may be used to obtain additional coding regions, and thus additional protein sequence, using techniques known in the art.

[0087] In a preferred embodiment, the CA proteins are derivative or variant CA proteins as compared to the wild-type sequence. That is, as outlined more fully below, the derivative CA peptide will contain at least one amino acid substitution, deletion or insertion, with amino acid substitutions being particularly preferred. The amino acid substitution, insertion or deletion may occur at any residue within the CA peptide.

[0088] Also included in an embodiment of CA proteins of the present invention are amino acid sequence variants. These variants fall into one or more of three classes: substitutional, insertional or deletional variants. These variants ordinarily are prepared by site specific mutagenesis of nucleotides in the DNA encoding the CA protein, using cassette or PCR mutagenesis or other techniques well known in the art, to produce DNA encoding the variant, and thereafter expressing the DNA in recombinant cell culture as outlined above. However, variant CA protein fragments having up to about 100-150 residues may be prepared by in vitro synthesis using established techniques. Amino acid sequence variants are characterized by the predetermined nature of the variation, a feature that sets them apart from naturally occurring allelic or interspecies variation of the CA protein amino acid sequence. The variants typically exhibit the same qualitative biological activity as the naturally occurring analogue, although variants can also be selected which have modified characteristics as will be more fully outlined below.

[0089] While the site or region for introducing an amino acid sequence variation is predetermined, the mutation per se need not be predetermined. For example, in order to optimize the performance of a mutation at a given site, random mutagenesis may be conducted at the target codon or region and the expressed CA variants screened for the optimal combination of desired activity. Techniques for making substitution mutations at predetermined sites in DNA having a known sequence are well known, for example, M13 primer mutagenesis and LAR mutagenesis. Screening of the mutants is done using assays of CA protein activities.

[0090] Amino acid substitutions are typically of single residues; insertions usually will be on the order of from about 1 to 20 amino acids, although considerably larger insertions may be tolerated. Deletions range from about 1 to about 20 residues, although in some cases deletions may be much larger.

[0091] Substitutions, deletions, insertions or any combination thereof may be used to arrive at a final derivative. Generally these changes are done on a few amino acids to minimize the alteration of the molecule. However, larger changes may be tolerated in certain circumstances. When small alterations in the characteristics of the CA protein are desired, substitutions are generally made in accordance with the following chart:

CHART I

| Original | Exemplary |
|---|---|
| Residue | Substitutions |
| Ala | Ser |
| Arg | Lys |
| Asn | Gln, His |
| Asp | Glu |
| Cys | Ser |
| Gln | Asn |
| Glu | Asp |
| Gly | Pro |
| His | Asn, Gln |
| Ile | Leu, Val |
| Leu | Ile, Val |
| Lys | Arg, Gln, Glu |
| Met | Leu, Ile |
| Phe | Met, Leu, Tyr |
| Ser | Thr |
| Thr | Ser |
| Trp | Tyr |
| Tyr | Trp, Phe |
| Val | Ile, Leu |

[0092] Substantial changes in function or immunological identity are made by selecting substitutions that are less conservative than those shown in Chart I. For example, substitutions may be made which more significantly affect: the structure of the polypeptide backbone in the area of the alteration, for example the alpha-helical or beta-sheet structure; the charge or hydrophobicity of the molecule at the target site; or the bulk of the side chain. The substitutions which in general are expected to produce the greatest changes in the polypeptide's properties are those in which (a) a hydrophilic residue, e.g. seryl or threonyl is substituted for (or by) a hydrophobic residue, e.g. leucyl, isoleucyl, phenylalanyl, valyl or alanyl; (b) a cysteine or proline is substituted for (or by) any other residue; (c) a residue having an electropositive side chain, e.g. lysyl, arginyl, or histidyl, is substituted for (or by) an electronegative residue, e.g. glutamyl or aspartyl; or (d) a residue having a bulky side chain, e.g. phenylalanine, is substituted for (or by) one not having a side chain, e.g. glycine.

[0093] The variants typically exhibit the same qualitative biological activity and will elicit the same immune response as the naturally-occurring analogue, although variants also are selected to modify the characteristics of the CA proteins as needed. Alternatively, the variant may be designed such that the biological activity of the CA protein is altered. For example, glycosylation sites may be altered or removed, dominant negative mutations created, etc.

[0094] Covalent modifications of CA polypeptides are included within the scope of this invention, for example for use in screening. One type of covalent modification includes reacting targeted amino acid residues of an CA polypeptide with an organic derivatizing agent that is capable of reacting with selected side chains or the N-or C-terminal residues of an CA polypeptide. Derivatization with bifunctional agents is useful, for instance, for crosslinking CA polypeptides to a water-insoluble support matrix or surface for use in the method for purifying anti-CA antibodies or screening assays, as is more fully described below. Commonly used crosslinking agents include, e.g., 1,1-bis(diazoacetyl)-2-phenylethane, glutaraldehyde, N-hydroxysuccinimide esters, for example, esters with 4-azidosalicylic acid, homobifunctional imidoesters, including disuccinimidyl esters such as 3,3′-dithiobis(succinimidylpropionate), bifunctional maleimides such as bis-N-maleimido-1,8-octane and agents such as methyl-3-[(p-azidophenyl)dithio]propioimidate.

[0095] Other modifications include deamidation of glutaminyl and asparaginyl residues to the corresponding glutamyl and aspartyl residues, respectively, hydroxylation of proline and lysine, phosphorylation of hydroxyl groups of seryl, threonyl or tyrosyl residues, methylation of the a-amino groups of lysine, arginine, and histidine side chains [T. E. Creighton, Proteins: Structure and Molecular Properties, W.H.

[0096] Freeman & Co., San Francisco, pp. 79-86 (1983)], acetylation of the N-terminal amine, and amidation of any C-terminal carboxyl group.

[0097] Another type of covalent modification of the CA polypeptide included within the scope of this invention comprises altering the native glycosylation pattern of the polypeptide. “Altering the native glycosylation pattern” is intended for purposes herein to mean deleting one or more carbohydrate moieties found in native sequence CA polypeptide, and/or adding one or more glycosylation sites that are not present in the native sequence CA polypeptide.

[0098] Addition of glycosylation sites to CA polypeptides may be accomplished by altering the amino acid sequence thereof. The alteration may be made, for example, by the addition of, or substitution by, one or more serine or threonine residues to the native sequence CA polypeptide (for O-linked glycosylation sites). The CA amino acid sequence may optionally be altered through changes at the DNA level, particularly by mutating the DNA encoding the CA polypeptide at preselected bases such that codons are generated that will translate into the desired amino acids.

[0099] Another means of increasing the number of carbohydrate moieties on the CA polypeptide is by chemical or enzymatic coupling of glycosides to the polypeptide. Such methods are described in the art, e.g., in WO 87/05330 published 11 Sep. 1987, and in Aplin and Wriston, LA Crit. Rev. Biochem., pp. 259-306 (1981).

[0100] Removal of carbohydrate moieties present on the CA polypeptide may be accomplished chemically or enzymatically or by mutational substitution of codons encoding for amino acid residues that serve as targets for glycosylation. Chemical deglycosylation techniques are known in the art and described, for instance, by Hakimuddin, et al., Arch. Biochem. Biophys., 259:52 (1987) and by Edge et al., Anal. Biochem., 118:131 (1981). Enzymatic cleavage of carbohydrate moieties on polypeptides can be achieved by the use of a variety of endo-and exo-glycosidases as described by Thotakura et al., Meth. Enzymol., 138:350 (1987).

[0101] Another type of covalent modification of CA comprises linking the CA polypeptide to one of a variety of nonproteinaceous polymers, e.g., polyethylene glycol, polypropylene glycol, or polyoxyalkylenes, in the manner set forth in U.S. Pat. Nos. 4,640,835; 4,496,689; 4,301,144; 4,670,417; 4,791,192 or 4,179,337.

[0102] CA polypeptides of the present invention may also be modified in a way to form chimeric molecules comprising an CA polypeptide fused to another, heterologous polypeptide or amino acid sequence. In one embodiment, such a chimeric molecule comprises a fusion of an CA polypeptide with a tag polypeptide which provides an epitope to which an anti-tag antibody can selectively bind. The epitope tag is generally placed at the amino-or carboxyl-terminus of the CA polypeptide, although internal fusions may also be tolerated in some instances. The presence of such epitope-tagged forms of an CA polypeptide can be detected using an antibody against the tag polypeptide. Also, provision of the epitope tag enables the CA polypeptide to be readily purified by affinity purification using an anti-tag antibody or another type of affinity matrix that binds to the epitope tag. In an alternative embodiment, the chimeric molecule may comprise a fusion of an CA polypeptide with an immunoglobulin or a particular region of an immunoglobulin. For a bivalent form of the chimeric molecule, such a fusion could be to the Fc region of an IgG molecule.

[0103] Various tag polypeptides and their respective antibodies are well known in the art. Examples include poly-histidine (poly-his) or poly-histidine-glycine (poly-his-gly) tags; the flu HA tag polypeptide and its antibody 12CA5 [Field et al., Mol. Cell. Biol., 8:2159-2165 (1988)]; the c-myc tag and the 8F9, 3C7, 6E10, G4, B7 and 9E10 antibodies thereto [Evan et al., Molecular and Cellular Biology, 5:3610-3616 (1985)]; and the Herpes Simplex virus glycoprotein D (gD) tag and its antibody [Paborsky et al., Protein Engineering, 3(6):547-553 (1990)]. Other tag polypeptides include the Flag-peptide [Hopp et al., BioTechnology, 6:1204-1210 (1988)]; the KT3 epitope peptide [Martin et al., Science, 255:192-194 (1992)]; tubulin epitope peptide (Skinner et al., J. Biol. Chem., 266:15163-15166 (1991)]; and the T7 gene 10 protein peptide tag [Lutz-Freyermuth et al., Proc. Natl. Acad. Sci. USA, 87:6393-6397 (1990)].

[0104] Also included with the definition of CA protein in one embodiment are other CA proteins of the CA family, and CA proteins from other organisms, which are cloned and expressed as outlined below. Thus, probe or degenerate polymerase chain reaction (PCR) primer sequences may be used to find other related CA proteins from humans or other organisms. As will be appreciated by those in the art, particularly useful probe and/or PCR primer sequences include the unique areas of the CA nucleic acid sequence. As is generally known in the art, preferred PCR primers are from about 15 to about 35 nucleotides in length, with from about 20 to about 30 being preferred, and may contain inosine as needed. The conditions for the PCR reaction are well known in the art.

[0105] In addition, as is outlined herein, CA proteins can be made that are longer than those encoded by the nucleic acids of the figures, for example, by the elucidation of additional sequences, the addition of epitope or purification tags, the addition of other fusion sequences, etc.

[0106] CA proteins may also be identified as being encoded by CA nucleic acids. Thus, CA proteins are encoded by nucleic acids that will hybridize to the sequences of the sequence listings, or their complements, as outlined herein.

[0107] In a preferred embodiment, the invention provides CA antibodies. In a preferred embodiment, when the CA protein is to be used to generate antibodies, for example for immunotherapy, the CA protein should share at least one epitope or determinant with the full length protein. By “epitope” or “determinant” herein is meant a portion of a protein which will generate and/or bind an antibody or T-cell receptor in the context of MHC. Thus, in most instances, antibodies made to a smaller CA protein will be able to bind to the full length protein. In a preferred embodiment, the epitope is unique; that is, antibodies generated to a unique epitope show little or no cross-reactivity.

[0108] In one embodiment, the term “antibody” includes antibody fragments, as are known in the art, including Fab, Fab₂, single chain antibodies (Fv for example), chimeric antibodies, etc., either produced by the modification of whole antibodies or those synthesized de novo using recombinant DNA technologies.

[0109] Methods of preparing polyclonal antibodies are known to the skilled artisan. Polyclonal antibodies can be raised in a mammal, for example, by one or more injections of an immunizing agent and, if desired, an adjuvant. Typically, the immunizing agent and/or adjuvant will be injected in the mammal by multiple subcutaneous or intraperitoneal injections. The immunizing agent may include a protein encoded by a nucleic acid of the figures or fragment thereof or a fusion protein thereof. It may be useful to conjugate the immunizing agent to a protein known to be immunogenic in the mammal being immunized. Examples of such immunogenic proteins include but are not limited to keyhole limpet hemocyanin, serum albumin, bovine thyroglobulin, and soybean trypsin inhibitor. Examples of adjuvants which may be employed include Freund's complete adjuvant and MPL-TDM adjuvant (monophosphoryl Lipid A, synthetic trehalose dicorynomycolate). The immunization protocol may be selected by one skilled in the art without undue experimentation.

[0110] The antibodies may, alternatively, be monoclonal antibodies. Monoclonal antibodies may be prepared using hybridoma methods, such as those described by Kohler and Milstein, Nature, 256:495 (1975). In a hybridoma method, a mouse, hamster, or other appropriate host animal, is typically immunized with an immunizing agent to elicit lymphocytes that produce or are capable of producing antibodies that will specifically bind to the immunizing agent. Alternatively, the lymphocytes may be immunized in vitro. The immunizing agent will typically include a polypeptide encoded by a nucleic acid of Tables 1-10, or fragment thereof or a fusion protein thereof. Generally, either peripheral blood lymphocytes (“PBLs”) are used if cells of human origin are desired, or spleen cells or lymph node cells are used if non-human mammalian sources are desired. The lymphocytes are then fused with an immortalized cell line using a suitable fusing agent, such as polyethylene glycol, to form a hybridoma cell [Goding, Monoclonal Antibodies: Principles and Practice, Academic Press, (1986) pp. 59-103]. Immortalized cell lines are usually transformed mammalian cells, particularly myeloma cells of rodent, bovine and human origin. Usually, rat or mouse myeloma cell lines are employed. The hybridoma cells may be cultured in a suitable culture medium that preferably contains one or more substances that inhibit the growth or survival of the unfused, immortalized cells. For example, if the parental cells lack the enzyme hypoxanthine guanine phosphoribosyl transferase (HGPRT or HPRT), the culture medium for the hybridomas typically will include hypoxanthine, aminopterin, and thymidine (“HAT medium”), which substances prevent the growth of HGPRT-deficient cells.

[0111] In one embodiment, the antibodies are bispecific antibodies. Bispecific antibodies are monoclonal, preferably human or humanized, antibodies that have binding specificities for at least two different antigens. In the present case, one of the binding specificities is for a protein encoded by a nucleic acid of Tables 1, or a fragment thereof, the other one is for any other antigen, and preferably for a cell-surface protein or receptor or receptor subunit, preferably one that is tumor specific.

[0112] In a preferred embodiment, the antibodies to CA are capable of reducing or eliminating the biological function of CA, as is described below. That is, the addition of anti-CA antibodies (either polyclonal or preferably monoclonal) to CA (or cells containing CA) may reduce or eliminate the CA activity. Generally, at least a 25% decrease in activity is preferred, with at least about 50% being particularly preferred and about a 95-100% decrease being especially preferred.

[0113] In a preferred embodiment the antibodies to the CA proteins are humanized antibodies. Humanized forms of non-human (e.g., murine) antibodies are chimeric molecules of immunoglobulins, immunoglobulin chains or fragments thereof (such as Fv, Fab, Fab′, F(ab′)₂ or other antigen binding subsequences of antibodies) which contain minimal sequence derived from non-human immunoglobulin. Humanized antibodies include human immunoglobulins (recipient antibody) in which residues form a complementary determining region (CDR) of the recipient are replaced by residues from a CDR of a non-human species (donor antibody) such as mouse, rat or rabbit having the desired specificity, affinity and capacity. In some instances, Fv framework residues of the human immunoglobulin are replaced by corresponding non-human residues. Humanized antibodies may also comprise residues which are found neither in the recipient antibody nor in the imported CDR or framework sequences. In general, the humanized antibody will comprise substantially all of at least one, and typically two, variable domains, in which all or substantially all of the CDR regions correspond to those of a non-human immunoglobulin and all or substantially all of the framework residues (FR) regions are those of a human immunoglobulin consensus sequence. The humanized antibody optimally also will comprise at least a portion of an immunoglobulin constant region (Fc), typically that of a human immunoglobulin [Jones et al., Nature, 321:522-525 (1986); Riechmann et al., Nature, 332:323-329 (1988); and Presta, Curr. Op. Struct. Biol., 2:593-596 (1992)].

[0114] Methods for humanizing non-human antibodies are well known in the art. Generally, a humanized antibody has one or more amino acid residues introduced into it from a source which is non-human. These non-human amino acid residues are often referred to as import residues, which are typically taken from an import variable domain. Humanization can be essentially performed following the method of Winter and co-workers [Jones et al., Nature, 321:522-525 (1986); Riechmann et al., Nature, 332:323-327 (1988); Verhoeyen et al., Science, 239:1534-1536 (1988)], by substituting rodent CDRs or CDR sequences for the corresponding sequences of a human antibody. Accordingly, such humanized antibodies are chimeric antibodies (U.S. Pat. No. 4,816,567), wherein substantially less than an intact human variable domain has been substituted by the corresponding sequence from a non-human species. In practice, humanized antibodies are typically human antibodies in which some CDR residues and possibly some FR residues are substituted by residues from analogous sites in rodent antibodies.

[0115] Human antibodies can also be produced using various techniques known in the art, including phage display libraries [Hoogenboom and Winter, J. Mol. Biol., 227:381 (1991); Marks et al., J. Mol. Biol., 222:581 (1991)]. The techniques of Cole et al. and Boerner et al. are also available for the preparation of human monoclonal antibodies [Cole et al., Monoclonal Antibodies and Cancer Therapy, Alan R. Liss, p. 77 (1985) and Boerner et al., J. Immunol., 147(1):86-95 (1991)]. Similarly, human antibodies can be made by introducing human immunoglobulin loci into transgenic animals, e.g., mice in which the endogenous immunoglobulin genes have been partially or completely inactivated. Upon challenge, human antibody production is observed, which closely resembles that seen in humans in all respects, including gene rearrangement, assembly, and antibody repertoire. This approach is described, for example, in U.S. Pat. Nos. 5,545,807; 5,545,806; 5,569,825; 5,625,126; 5,633,425; 5,661,016, and in the following scientific publications: Marks et al., Bio/Technology 10, 779-783 (1992); Lonberg et al., Nature 368 856-859 (1994); Morrison, Nature 368, 812-13 (1994); Fishwild et al., Nature Biotechnology 14, 845-51 (1996); Neuberger, Nature Biotechnology 14, 826 (1996); Lonberg and Huszar, Intern. Rev. Immunol. 13 65-93 (1995).

[0116] By immunotherapy is meant treatment of a carcinoma with an antibody raised against an CA protein. As used herein, immunotherapy can be passive or active. Passive immunotherapy as defined herein is the passive transfer of antibody to a recipient (patient). Active immunization is the induction of antibody and/or T-cell responses in a recipient (patient). Induction of an immune response is the result of providing the recipient with an antigen to which antibodies are raised. As appreciated by one of ordinary skill in the art, the antigen may be provided by injecting a polypeptide against which antibodies are desired to be raised into a recipient, or contacting the recipient with a nucleic acid capable of expressing the antigen and under conditions for expression of the antigen.

[0117] In a preferred embodiment, oncogenes which encode secreted growth factors may be inhibited by raising antibodies against CA proteins that are secreted proteins as described above. Without being bound by theory, antibodies used for treatment, bind and prevent the secreted protein from binding to its receptor, thereby inactivating the secreted CA protein.

[0118] In another preferred embodiment, the CA protein to which antibodies are raised is a transmembrane protein. Without being bound by theory, antibodies used for treatment, bind the extracellular domain of the CA protein and prevent it from binding to other proteins, such as circulating ligands or cell-associated molecules. The antibody may cause down-regulation of the transmembrane CA protein. As will be appreciated by one of ordinary skill in the art, the antibody may be a competitive, non-competitive or uncompetitive inhibitor of protein binding to the extracellular domain of the CA protein. The antibody is also an antagonist of the CA protein. Further, the antibody prevents activation of the transmembrane CA protein. In one aspect, when the antibody prevents the binding of other molecules to the CA protein, the antibody prevents growth of the cell. The antibody may also sensitize the cell to cytotoxic agents, including, but not limited to TNF-α, TNF-β, IL-1, INF-γ and IL-2, or chemotherapeutic agents including 5FU, vinblastine, actinomycin D, cisplatin, methotrexate, and the like. In some instances the antibody belongs to a sub-type that activates serum complement when complexed with the transmembrane protein thereby mediating cytotoxicity. Thus, carcinomas may be treated by administering to a patient-antibodies directed against the transmembrane CA protein.

[0119] In another preferred embodiment, the antibody is conjugated to a therapeutic moiety. In one aspect the therapeutic moiety is a small molecule that modulates the activity of the CA protein. In another aspect the therapeutic moiety modulates the activity of molecules associated with or in close proximity to the CA protein. The therapeutic moiety may inhibit enzymatic activity such as protease or protein kinase activity associated with carcinoma.

[0120] In a preferred embodiment, the therapeutic moiety may also be a cytotoxic agent. In this method, targeting the cytotoxic agent to tumor tissue or cells, results in a reduction in the number of afflicted cells, thereby reducing symptoms associated with carcinomas, including lymphoma. Cytotoxic agents are numerous and varied and include, but are not limited to, cytotoxic drugs or toxins or active fragments of such toxins. Suitable toxins and their corresponding fragments include diphtheria A chain, exotoxin A chain, ricin A chain, abrin A chain, curcin, crotin, phenomycin, enomycin and the like. Cytotoxic agents also include radiochemicals made by conjugating radioisotopes to antibodies raised against CA proteins, or binding of a radionuclide to a chelating agent that has been covalently attached to the antibody. Targeting the therapeutic moiety to transmembrane CA proteins not only serves to increase the local concentration of therapeutic moiety in the carcinoma of interest, i.e., lymphoma, but also serves to reduce deleterious side effects that may be associated with the therapeutic moiety.

[0121] In another preferred embodiment, the CA protein against which the antibodies are raised is an intracellular protein. In this case, the antibody may be conjugated to a protein which facilitates entry into the cell. In one case, the antibody enters the cell by endocytosis. In another embodiment, a nucleic acid encoding the antibody is administered to the individual or cell. Moreover, wherein the CA protein can be targeted within a cell, i.e., the nucleus, an antibody thereto contains a signal for that target localization, i.e., a nuclear localization signal.

[0122] The CA antibodies of the invention specifically bind to CA proteins. By “specifically bind” herein is meant that the antibodies bind to the protein with a binding constant in the range of at least 10⁻⁴-10⁻⁶ M⁻¹, with a preferred range being 10⁻⁷-10⁻⁹ M⁻¹.

[0123] In a preferred embodiment, the CA protein is purified or isolated after expression. CA proteins may be isolated or purified in a variety of ways known to those skilled in the art depending on what other components are present in the sample. Standard purification methods include electrophoretic, molecular, immunological and chromatographic techniques, including ion exchange, hydrophobic, affinity, and reverse-phase HPLC chromatography, and chromatofocusing. For example, the CA protein may be purified using a standard anti-CA antibody column. Ultrafiltration and diafiltration techniques, in conjunction with protein concentration, are also useful. For general guidance in suitable purification techniques, see Scopes, R., Protein Purification, Springer-Verlag, NY (1982). The degree of purification necessary will vary depending on the use of the CA protein. In some instances no purification will be necessary.

[0124] Once expressed and purified if necessary, the CA proteins and nucleic acids are useful in a number of applications.

[0125] In one aspect, the expression levels of genes are determined for different cellular states in the carcinoma phenotype; that is, the expression levels of genes in normal tissue and in carcinoma tissue (and in some cases, for varying severities of lymphoma that relate to prognosis, as outlined below) are evaluated to provide expression profiles. An expression profile of a particular cell state or point of development is essentially a “fingerprint” of the state; while two states may have any particular gene similarly expressed, the evaluation of a number of genes simultaneously allows the generation of a gene expression profile that is unique to the state of the cell. By comparing expression profiles of cells in different states, information regarding which genes are important (including both up- and down-regulation of genes) in each of these states is obtained. Then, diagnosis may be done or confirmed: does tissue from a particular patient have the gene expression profile of normal or carcinoma tissue.

[0126] “Differential expression,” or grammatical equivalents as used herein, refers to both qualitative as well as quantitative differences in the genes temporal and/or cellular expression patterns within and among the cells. Thus, a differentially expressed gene can qualitatively have its expression altered, including an activation or inactivation, in, for example, normal versus carcinoma tissue. That is, genes may be turned on or turned off in a particular state, relative to another state. As is apparent to the skilled artisan, any comparison of two or more states can be made. Such a qualitatively regulated gene will exhibit an expression pattern within a state or cell type which is detectable by standard techniques in one such state or cell type, but is not detectable in both. Alternatively, the determination is quantitative in that expression is increased or decreased; that is, the expression of the gene is either upregulated, resulting in an increased amount of transcript, or downregulated, resulting in a decreased amount of transcript. The degree to which expression differs need only be large enough to quantify via standard characterization techniques as outlined below, such as by use of Affymetrix GeneChip® expression arrays, Lockhart, Nature Biotechnology, 14:1675-1680 (1996), hereby expressly incorporated by reference. Other techniques include, but are not limited to, quantitative reverse transcriptase PCR, Northern analysis and RNase protection. As outlined above, preferably the change in expression (i.e. upregulation or downregulation) is at least about 50%, more preferably at least about 100%, more preferably at least about 150%, more preferably, at least about 200%, with from 300 to at least 1000% being especially preferred.

[0127] As will be appreciated by those in the art, this may be done by evaluation at either the gene transcript, or the protein level; that is, the amount of gene expression may be monitored using nucleic acid probes to the DNA or RNA equivalent of the gene transcript, and the quantification of gene expression levels, or, alternatively, the final gene product itself (protein) can be monitored, for example through the use of antibodies to the CA protein and standard immunoassays (ELISAs, etc.) or other techniques, including mass spectroscopy assays, 2D gel electrophoresis assays, etc. Thus, the proteins corresponding to CA genes, i.e. those identified as being important in a particular carcinoma phenotype, i.e., lymphoma, can be evaluated in a diagnostic test specific for that carcinoma.

[0128] In a preferred embodiment, gene expression monitoring is done and a number of genes, i.e. an expression profile, is monitored simultaneously, although multiple protein expression monitoring can be done as well. Similarly, these assays may be done on an individual basis as well.

[0129] In this embodiment, the CA nucleic acid probes may be attached to biochips as outlined herein for the detection and quantification of CA sequences in a particular cell. The assays are done as is known in the art. As will be appreciated by those in the art, any number of different CA sequences may be used as probes, with single sequence assays being used in some cases, and a plurality of the sequences described herein being used in other embodiments. In addition, while solid-phase assays are described, any number of solution based assays may be done as well.

[0130] In a preferred embodiment, both solid and solution based assays may be used to detect CA sequences that are up-regulated or down-regulated in carcinomas as compared to normal tissue. In instances where the CA sequence has been altered but shows the same expression profile or an altered expression profile, the protein will be detected as outlined herein.

[0131] In a preferred embodiment nucleic acids encoding the CA protein are detected. Although DNA or RNA encoding the CA protein may be detected, of particular interest are methods wherein the mRNA encoding a CA protein is detected. The presence of mRNA in a sample is an indication that the CA gene has been transcribed to form the mRNA, and suggests that the protein is expressed. Probes to detect the mRNA can be any nucleotide/deoxynucleotide probe that is complementary to and base pairs with the mRNA and includes but is not limited to oligonucleotides, cDNA or RNA. Probes also should contain a detectable label, as defined herein. In one method the mRNA is detected after immobilizing the nucleic acid to be examined on a solid support such as nylon membranes and hybridizing the probe with the sample. Following washing to remove the non-specifically bound probe, the label is detected. In another method detection of the mRNA is performed in situ. In this method permeabilized cells or tissue samples are contacted with a detectably labeled nucleic acid probe for sufficient time to allow the probe to hybridize with the target mRNA. Following washing to remove the non-specifically bound probe, the label is detected. For example a digoxygenin labeled riboprobe (RNA probe) that is complementary to the mRNA encoding a CA protein is detected by binding the digoxygenin with an anti-digoxygenin secondary antibody and developed with nitro blue tetrazolium and 5-bromo-4-chloro-3-indoyl phosphate.

[0132] In a preferred embodiment, any of the three classes of proteins as described herein (secreted, transmembrane or intracellular proteins) are used in diagnostic assays. The CA proteins, antibodies, nucleic acids, modified proteins and cells containing CA sequences are used in diagnostic assays. This can be done on an individual gene or corresponding polypeptide level, or as sets of assays.

[0133] As described and defined herein, CA proteins find use as markers of carcinomas, including lymphomas such as, but not limited to, Hodgkin's and non-Hodgkin lymphoma. Detection of these proteins in putative carcinoma tissue or patients allows for a determination or diagnosis of the type of carcinoma. Numerous methods known to those of ordinary skill in the art find use in detecting carcinomas. In one embodiment, antibodies are used to detect CA proteins. A preferred method separates proteins from a sample or patient by electrophoresis on a gel (typically a denaturing and reducing protein gel, but may be any other type of gel including isoelectric focusing gels and the like). Following separation of proteins, the CA protein is detected by immunoblotting with antibodies raised against the CA protein. Methods of immunoblotting are well known to those of ordinary skill in the art.

[0134] In another preferred method, antibodies to the CA protein find use in in situ imaging techniques. In this method cells are contacted with from one to many antibodies to the CA protein(s). Following washing to remove non-specific antibody binding, the presence of the antibody or antibodies is detected. In one embodiment the antibody is detected by incubating with a secondary antibody that contains a detectable label. In another method the primary antibody to the CA protein(s) contains a detectable label. In another preferred embodiment each one of multiple primary antibodies contains a distinct and detectable label. This method finds particular use in simultaneous screening for a plurality of CA proteins. As will be appreciated by one of ordinary skill in the art, numerous other histological imaging techniques are useful in the invention.

[0135] In a preferred embodiment the label is detected in a fluorometer which has the ability to detect and distinguish emissions of different wavelengths. In addition, a fluorescence activated cell sorter (FACS) can be used in the method.

[0136] In another preferred embodiment, antibodies find use in diagnosing carcinomas from blood samples. As previously described, certain CA proteins are secreted/circulating molecules. Blood samples, therefore, are useful as samples to be probed or tested for the presence of secreted CA proteins. Antibodies can be used to detect the CA proteins by any of the previously described immunoassay techniques including ELISA, immunoblotting (Western blotting), immunoprecipitation, BIACORE technology and the like, as will be appreciated by one of ordinary skill in the art.

[0137] In a preferred embodiment, in situ hybridization of labeled CA nucleic acid probes to tissue arrays is done. For example, arrays of tissue samples, including CA tissue and/or normal tissue, are made. In situ hybridization as is known in the art can then be done.

[0138] It is understood that when comparing the expression fingerprints between an individual and a standard, the skilled artisan can make a diagnosis as well as a prognosis. It is further understood that the genes which indicate the diagnosis may differ from those which indicate the prognosis.

[0139] In a preferred embodiment, the CA proteins, antibodies, nucleic acids, modified proteins and cells containing CA sequences are used in prognosis assays. As above, gene expression profiles can be generated that correlate to carcinoma, especially lymphoma, severity, in terms of long term prognosis. Again, this may be done on either a protein or gene level, with the use of genes being preferred. As above, the CA probes are attached to biochips for the detection and quantification of CA sequences in a tissue or patient. The assays proceed as outlined for diagnosis.

[0140] In a preferred embodiment, any of the CA sequences as described herein are used in drug screening assays. The CA proteins, antibodies, nucleic acids, modified proteins and cells containing CA sequences are used in drug screening assays or by evaluating the effect of drug candidates on a “gene expression profile” or expression profile of polypeptides. In one embodiment, the expression profiles are used, preferably in conjunction with high throughput screening techniques to allow monitoring for expression profile genes after treatment with a candidate agent, Zlokarnik, et al., Science 279, 84-8 (1998), Heid, et al., Genome Res., 6:986-994 (1996).

[0141] In a preferred embodiment, the CA proteins, antibodies, nucleic acids, modified proteins and cells containing the native or modified CA proteins are used in screening assays. That is, the present invention provides novel methods for screening for compositions which modulate the carcinoma phenotype. As above, this can be done by screening for modulators of gene expression or for modulators of protein activity. Similarly, this may be done on an individual gene or protein level or by evaluating the effect of drug candidates on a “gene expression profile”. In a preferred embodiment, the expression profiles are used, preferably in conjunction with high throughput screening techniques to allow monitoring for expression profile genes after treatment with a candidate agent, see Zlokarnik, supra.

[0142] Having identified the CA genes herein, a variety of assays to evaluate the effects of agents on gene expression may be executed. In a preferred embodiment, assays may be run on an individual gene or protein level. That is, having identified a particular gene as aberrantly regulated in carcinoma, candidate bioactive agents may be screened to modulate the genes response. “Modulation” thus includes both an increase and a decrease in gene expression or activity. The preferred amount of modulation will depend on the original change of the gene expression in normal versus tumor tissue, with changes of at least 10%, preferably 50%, more preferably 100-300%, and in some embodiments 300-1000% or greater. Thus, if a gene exhibits a 4 fold increase in tumor compared to normal tissue, a decrease of about four fold is desired; a 10 fold decrease in tumor compared to normal tissue gives a 10 fold increase in expression for a candidate agent is desired, etc. Alternatively, where the CA sequence has been altered but shows the same expression profile or an altered expression profile, the protein will be detected as outlined herein.

[0143] As will be appreciated by those in the art, this may be done by evaluation at either the gene or the protein level; that is, the amount of gene expression may be monitored using nucleic acid probes and the quantification of gene expression levels, or, alternatively, the level of the gene product itself can be monitored, for example through the use of antibodies to the CA protein and standard immunoassays. Alternatively, binding and bioactivity assays with the protein may be done as outlined below.

[0144] In a preferred embodiment, gene expression monitoring is done and a number of genes, i.e. an expression profile, is monitored simultaneously, although multiple protein expression monitoring can be done as well.

[0145] In this embodiment, the CA nucleic acid probes are attached to biochips as outlined herein for the detection and quantification of CA sequences in a particular cell. The assays are further described below.

[0146] Generally, in a preferred embodiment, a candidate bioactive agent is added to the cells prior to analysis. Moreover, screens are provided to identify a candidate bioactive agent which modulates a particular type of carcinoma, modulates CA proteins, binds to a CA protein, or interferes between the binding of a CA protein and an antibody.

[0147] The term “candidate bioactive agent” or “drug candidate” or grammatical equivalents as used herein describes any molecule, e.g., protein, oligopeptide, small organic or inorganic molecule, polysaccharide, polynucleotide, etc., to be tested for bioactive agents that are capable of directly or indirectly altering either the carcinoma phenotype, binding to and/or modulating the bioactivity of an CA protein, or the expression of a CA sequence, including both nucleic acid sequences and protein sequences. In a particularly preferred embodiment, the candidate agent suppresses a CA phenotype, for example to a normal tissue fingerprint. Similarly, the candidate agent preferably suppresses a severe CA phenotype. Generally a plurality of assay mixtures are run in parallel with different agent concentrations to obtain a differential response to the various concentrations. Typically, one of these concentrations serves as a negative control, i.e., at zero concentration or below the level of detection.

[0148] In one aspect, a candidate agent will neutralize the effect of an CA protein. By “neutralize” is meant that activity of a protein is either inhibited or counter acted against so as to have substantially no effect on a cell.

[0149] Candidate agents encompass numerous chemical classes, though typically they are organic or inorganic molecules, preferably small organic compounds having a molecular weight of more than 100 and less than about 2,500 daltons. Preferred small molecules are less than 2000, or less than 1500 or less than 1000 or less than 500 D. Candidate agents comprise functional groups necessary for structural interaction with proteins, particularly hydrogen bonding, and typically include at least an amine, carbonyl, hydroxyl or carboxyl group, preferably at least two of the functional chemical groups. The candidate agents often comprise cyclical carbon or heterocyclic structures and/or aromatic or polyaromatic structures substituted with one or more of the above functional groups. Candidate agents are also found among biomolecules including peptides, saccharides, fatty acids, steroids, purines, pyrimidines, derivatives, structural analogs or combinations thereof. Particularly preferred are peptides.

[0150] Candidate agents are obtained from a wide variety of sources including libraries of synthetic or natural compounds. For example, numerous means are available for random and directed synthesis of a wide variety of organic compounds and biomolecules, including expression of randomized oligonucleotides. Alternatively, libraries of natural compounds in the form of bacterial, fungal, plant and animal extracts are available or readily produced. Additionally, natural or synthetically produced libraries and compounds are readily modified through conventional chemical, physical and biochemical means. Known pharmacological agents may be subjected to directed or random chemical modifications, such as acylation, alkylation, esterification, amidification to produce structural analogs.

[0151] In a preferred embodiment, the candidate bioactive agents are proteins. By “protein” herein is meant at least two covalently attached amino acids, which includes proteins, polypeptides, oligopeptides and peptides. The protein may be made up of naturally occurring amino acids and peptide bonds, or synthetic peptidomimetic structures. Thus “amino acid”, or “peptide residue”, as used herein means both naturally occurring and synthetic amino acids. For example, homo-phenylalanine, citrulline and noreleucine are considered amino acids for the purposes of the invention. “Amino acid” also includes imino acid residues such as proline and hydroxyproline. The side chains may be in either the (R) or the (S) configuration. In the preferred embodiment, the amino acids are in the (S) or L-configuration. If non-naturally occurring side chains are used, non-amino acid substituents may be used, for example to prevent or retard in vivo degradations.

[0152] In a preferred embodiment, the candidate bioactive agents are naturally occurring proteins or fragments of naturally occurring proteins. Thus, for example, cellular extracts containing proteins, or random or directed digests of proteinaceous cellular extracts, may be used. In this way libraries of procaryotic and eucaryotic proteins may be made for screening in the methods of the invention. Particularly preferred in this embodiment are libraries of bacterial, fungal, viral, and mammalian proteins, with the latter being preferred, and human proteins being especially preferred.

[0153] In a preferred embodiment, the candidate bioactive agents are peptides of from about 5 to about 30 amino acids, with from about 5 to about 20 amino acids being preferred, and from about 7 to about 15 being particularly preferred. The peptides may be digests of naturally occurring proteins as is outlined above, random peptides, or “biased” random peptides. By “randomized” or grammatical equivalents herein is meant that each nucleic acid and peptide consists of essentially random nucleotides and amino acids, respectively. Since generally these random peptides (or nucleic acids, discussed below) are chemically synthesized, they may incorporate any nucleotide or amino acid at any position. The synthetic process can be designed to generate randomized proteins or nucleic acids, to allow the formation of all or most of the possible combinations over the length of the sequence, thus forming a library of randomized candidate bioactive proteinaceous agents.

[0154] In one embodiment, the library is fully randomized, with no sequence preferences or constants at any position. In a preferred embodiment, the library is biased. That is, some positions within the sequence are either held constant, or are selected from a limited number of possibilities. For example, in a preferred embodiment, the nucleotides or amino acid residues are randomized within a defined class, for example, of hydrophobic amino acids, hydrophilic residues, sterically biased (either small or large) residues, towards the creation of nucleic acid binding domains, the creation of cysteines, for cross-linking, prolines for SH-3 domains, serines, threonines, tyrosines or histidines for phosphorylation sites, etc., or to purines, etc.

[0155] In a preferred embodiment, the candidate bioactive agents are nucleic acids, as defined above.

[0156] As described above generally for proteins, nucleic acid candidate bioactive agents may be naturally occurring nucleic acids, random nucleic acids, or “biased” random nucleic acids. For example, digests of procaryotic or eucaryotic genomes may be used as is outlined above for proteins.

[0157] In a preferred embodiment, the candidate bioactive agents are organic chemical moieties, a wide variety of which are available in the literature.

[0158] In assays for altering the expression profile of one or more CA genes, after the candidate agent has been added and the cells allowed to incubate for some period of time, the sample containing the target sequences to be analyzed is added to the biochip. If required, the target sequence is prepared using known techniques. For example, the sample may be treated to lyse the cells, using known lysis buffers, electroporation, etc., with purification and/or amplification such as PCR occurring as needed, as will be appreciated by those in the art. For example, an in vitro transcription with labels covalently attached to the nucleosides is done. Generally, the nucleic acids are labeled with a label as defined herein, with biotin-FITC or PE, cy3 and cy5 being particularly preferred.

[0159] In a preferred embodiment, the target sequence is labeled with, for example, a fluorescent, chemiluminescent, chemical, or radioactive signal, to provide a means of detecting the target sequence's specific binding to a probe. The label also can be an enzyme, such as, alkaline phosphatase or horseradish peroxidase, which when provided with an appropriate substrate produces a product that can be detected. Alternatively, the label can be a labeled compound or small molecule, such as an enzyme inhibitor, that binds but is not catalyzed or altered by the enzyme. The label also can be a moiety or compound, such as, an epitope tag or biotin which specifically binds to streptavidin. For the example of biotin, the streptavidin is labeled as described above, thereby, providing a detectable signal for the bound target sequence. As known in the art, unbound labeled streptavidin is removed prior to analysis.

[0160] As will be appreciated by those in the art, these assays can be direct hybridization assays or can comprise “sandwich assays”, which include the use of multiple probes, as is generally outlined in U.S. Pat. Nos. 5,681,702, 5,597,909, 5,545,730, 5,594,117, 5,591,584, 5,571,670, 5,580,731, 5,571,670, 5,591,584, 5,624,802, 5,635,352, 5,594,118, 5,359,100, 5,124,246 and 5,681,697, all of which are hereby incorporated by reference. In this embodiment, in general, the target nucleic acid is prepared as outlined above, and then added to the biochip comprising a plurality of nucleic acid probes, under conditions that allow the formation of a hybridization complex.

[0161] A variety of hybridization conditions may be used in the present invention, including high, moderate and low stringency conditions as outlined above. The assays are generally run under stringency conditions which allows formation of the label probe hybridization complex only in the presence of target. Stringency can be controlled by altering a step parameter that is a thermodynamic variable, including, but not limited to, temperature, formamide concentration, salt concentration, chaotropic salt concentration pH, organic solvent concentration, etc.

[0162] These parameters may also be used to control non-specific binding, as is generally outlined in U.S. Pat. No. 5,681,697. Thus it may be desirable to perform certain steps at higher stringency conditions to reduce non-specific binding.

[0163] The reactions outlined herein may be accomplished in a variety of ways, as will be appreciated by those in the art. Components of the reaction may be added simultaneously, or sequentially, in any order, with preferred embodiments outlined below. In addition, the reaction may include a variety of other reagents may be included in the assays. These include reagents like salts, buffers, neutral proteins, e.g. albumin, detergents, etc which may be used to facilitate optimal hybridization and detection, and/or reduce non-specific or background interactions. Also reagents that otherwise improve the efficiency of the assay, such as protease inhibitors, nuclease inhibitors, anti-microbial agents, etc., may be used, depending on the sample preparation methods and purity of the target. In addition, either solid phase or solution based (i.e., kinetic PCR) assays may be used.

[0164] Once the assay is run, the data is analyzed to determine the expression levels, and changes in expression levels as between states, of individual genes, forming a gene expression profile.

[0165] In a preferred embodiment, as for the diagnosis and prognosis applications, having identified the differentially expressed gene(s) or mutated gene(s) important in any one state, screens can be run to alter the expression of the genes individually. That is, screening for modulation of regulation of expression of a single gene can be done. Thus, for example, particularly in the case of target genes whose presence or absence is unique between two states, screening is done for modulators of the target gene expression.

[0166] In addition, screens can be done for novel genes that are induced in response to a candidate agent. After identifying a candidate agent based upon its ability to suppress a CA expression pattern leading to a normal expression pattern, or modulate a single CA gene expression profile so as to mimic the expression of the gene from normal tissue, a screen as described above can be performed to identify genes that are specifically modulated in response to the agent. Comparing expression profiles between normal tissue and agent treated CA tissue reveals genes that are not expressed in normal tissue or CA tissue, but are expressed in agent treated tissue. These agent specific sequences can be identified and used by any of the methods described herein for CA genes or proteins. In particular these sequences and the proteins they encode find use in marking or identifying agent treated cells. In addition, antibodies can be raised against the agent induced proteins and used to target novel therapeutics to the treated CA tissue sample.

[0167] Thus, in one embodiment, a candidate agent is administered to a population of CA cells, that thus has an associated CA expression profile. By “administration” or “contacting” herein is meant that the candidate agent is added to the cells in such a manner as to allow the agent to act upon the cell, whether by uptake and intracellular action, or by action at the cell surface. In some embodiments, nucleic acid encoding a proteinaceous candidate agent (i.e. a peptide) may be put into a viral construct such as a retroviral construct and added to the cell, such that expression of the peptide agent is accomplished; see PCT US97/01019, hereby expressly incorporated by reference.

[0168] Once the candidate agent has been administered to the cells, the cells can be washed if desired and are allowed to incubate under preferably physiological conditions for some period of time. The cells are then harvested and a new gene expression profile is generated, as outlined herein.

[0169] Thus, for example, CA tissue may be screened for agents that reduce or suppress the CA phenotype. A change in at least one gene of the expression profile indicates that the agent has an effect on CA activity. By defining such a signature for the CA phenotype, screens for new drugs that alter the phenotype can be devised. With this approach, the drug target need not be known and need not be represented in the original expression screening platform, nor does the level of transcript for the target protein need to change.

[0170] In a preferred embodiment, as outlined above, screens may be done on individual genes and gene products (proteins). That is, having identified a particular differentially expressed gene as important in a particular state, screening of modulators of either the expression of the gene or the gene product itself can be done. The gene products of differentially expressed genes are sometimes referred to herein as “CA proteins” or an “CAP”. The CAP may be a fragment, or alternatively, be the full length protein to the fragment encoded by the nucleic acids of Tables 1-10. Preferably, the CAP is a fragment. In another embodiment, the sequences are sequence variants as further described herein.

[0171] Preferably, the CAP is a fragment of approximately 14 to 24 amino acids long. More preferably the fragment is a soluble fragment. Preferably, the fragment includes a non-transmembrane region. In a preferred embodiment, the fragment has an N-terminal Cys to aid in solubility. In one embodiment, the c-terminus of the fragment is kept as a free acid and the n-terminus is a free amine to aid in coupling, i.e., to cysteine.

[0172] In one embodiment the CA proteins are conjugated to an immunogenic agent as discussed herein. In one embodiment the CA protein is conjugated to BSA.

[0173] In a preferred embodiment, screening is done to alter the biological function of the expression product of the CA gene. Again, having identified the importance of a gene in a particular state, screening for agents that bind and/or modulate the biological activity of the gene product can be run as is more fully outlined below.

[0174] In a preferred embodiment, screens are designed to first find candidate agents that can bind to CA proteins, and then these agents may be used in assays that evaluate the ability of the candidate agent to modulate the CAP activity and the carcinoma phenotype. Thus, as will be appreciated by those in the art, there are a number of different assays which may be run; binding assays and activity assays.

[0175] In a preferred embodiment, binding assays are done. In general, purified or isolated gene product is used; that is, the gene products of one or more CA nucleic acids are made. In general, this is done as is known in the art. For example, antibodies are generated to the protein gene products, and standard immunoassays are run to determine the amount of protein present. Alternatively, cells comprising the CA proteins can be used in the assays.

[0176] Thus, in a preferred embodiment, the methods comprise combining a CA protein and a candidate bioactive agent, and determining the binding of the candidate agent to the CA protein. Preferred embodiments utilize the human or mouse CA protein, although other mammalian proteins may also be used, for example for the development of animal models of human disease. In some embodiments, as outlined herein, variant or derivative CA proteins may be used.

[0177] Generally, in a preferred embodiment of the methods herein, the CA protein or the candidate agent is non-diffusably bound to an insoluble support having isolated sample receiving areas (e.g. a microtiter plate, an array, etc.). The insoluble supports may be made of any composition to which the compositions can be bound, is readily separated from soluble material, and is otherwise compatible with the overall method of screening. The surface of such supports may be solid or porous and of any convenient shape. Examples of suitable insoluble supports include microtiter plates, arrays, membranes and beads. These are typically made of glass, plastic (e.g., polystyrene), polysaccharides, nylon or nitrocellulose, Teflon™, etc. Microtiter plates and arrays are especially convenient because a large number of assays can be carried out simultaneously, using small amounts of reagents and samples. The particular manner of binding of the composition is not crucial so long as it is compatible with the reagents and overall methods of the invention, maintains the activity of the composition and is nondiffusable. Preferred methods of binding include the use of antibodies (which do not sterically block either the ligand binding site or activation sequence when the protein is bound to the support), direct binding to “sticky” or ionic supports, chemical crosslinking, the synthesis of the protein or agent on the surface, etc. Following binding of the protein or agent, excess unbound material is removed by washing. The sample receiving areas may then be blocked through incubation with bovine serum albumin (BSA), casein or other innocuous protein or other moiety.

[0178] In a preferred embodiment, the CA protein is bound to the support, and a candidate bioactive agent is added to the assay. Alternatively, the candidate agent is bound to the support and the CA protein is added. Novel binding agents include specific antibodies, non-natural binding agents identified in screens of chemical libraries, peptide analogs, etc. Of particular interest are screening assays for agents that have a low toxicity for human cells. A wide variety of assays may be used for this purpose, including labeled in vitro protein-protein binding assays, electrophoretic mobility shift assays, immunoassays for protein binding, functional assays (phosphorylation assays, etc.) and the like.

[0179] The determination of the binding of the candidate bioactive agent to the CA protein may be done in a number of ways. In a preferred embodiment, the candidate bioactive agent is labeled, and binding determined directly. For example, this may be done by attaching all or a portion of the CA protein to a solid support, adding a labeled candidate agent (for example a fluorescent label), washing off excess reagent, and determining whether the label is present on the solid support. Various blocking and washing steps may be utilized as is known in the art.

[0180] By “labeled” herein is meant that the compound is either directly or indirectly labeled with a label which provides a detectable signal, e.g. radioisotope, fluorescers, enzyme, antibodies, particles such as magnetic particles, chemiluminescers, or specific binding molecules, etc. Specific binding molecules include pairs, such as biotin and streptavidin, digoxin and antidigoxin etc. For the specific binding members, the complementary member would normally be labeled with a molecule which provides for detection, in accordance with known procedures, as outlined above. The label can directly or indirectly provide a detectable signal.

[0181] In some embodiments, only one of the components is labeled. For example, the proteins (or proteinaceous candidate agents) may be labeled at tyrosine positions using 1251, or with fluorophores. Alternatively, more than one component may be labeled with different labels; using 1251 for the proteins, for example, and a fluorophor for the candidate agents.

[0182] In a preferred embodiment, the binding of the candidate bioactive agent is determined through the use of competitive binding assays. In this embodiment, the competitor is a binding moiety known to bind to the target molecule (i.e. CA protein), such as an antibody, peptide, binding partner, ligand, etc. Under certain circumstances, there may be competitive binding as between the bioactive agent and the binding moiety, with the binding moiety displacing the bioactive agent.

[0183] In one embodiment, the candidate bioactive agent is labeled. Either the candidate bioactive agent, or the competitor, or both, is added first to the protein for a time sufficient to allow binding, if present. Incubations may be performed at any temperature which facilitates optimal activity, typically between 4 and 40° C. Incubation periods are selected for optimum activity, but may also be optimized to facilitate rapid high through put screening. Typically between 0.1 and 1 hour will be sufficient. Excess reagent is generally removed or washed away. The second component is then added, and the presence or absence of the labeled component is followed, to indicate binding.

[0184] In a preferred embodiment, the competitor is added first, followed by the candidate bioactive agent. Displacement of the competitor is an indication that the candidate bioactive agent is binding to the CA protein and thus is capable of binding to, and potentially modulating, the activity of the CA protein. In this embodiment, either component can be labeled. Thus, for example, if the competitor is labeled, the presence of label in the wash solution indicates displacement by the agent. Alternatively, if the candidate bioactive agent is labeled, the presence of the label on the support indicates displacement.

[0185] In an alternative embodiment, the candidate bioactive agent is added first, with incubation and washing, followed by the competitor. The absence of binding by the competitor may indicate that the bioactive agent is bound to the CA protein with a higher affinity. Thus, if the candidate bioactive agent is labeled, the presence of the label on the support, coupled with a lack of competitor binding, may indicate that the candidate agent is capable of binding to the CA protein.

[0186] In a preferred embodiment, the methods comprise differential screening to identity bioactive agents that are capable of modulating the activity of the CA proteins. In this embodiment, the methods comprise combining a CA protein and a competitor in a first sample. A second sample comprises a candidate bioactive agent, a CA protein and a competitor. The binding of the competitor is determined for both samples, and a change, or difference in binding between the two samples indicates the presence of an agent capable of binding to the CA protein and potentially modulating its activity. That is, if the binding of the competitor is different in the second sample relative to the first sample, the agent is capable of binding to the CA protein.

[0187] Alternatively, a preferred embodiment utilizes differential screening to identify drug candidates that bind to the native CA protein, but cannot bind to modified CA proteins. The structure of the CA protein may be modeled, and used in rational drug design to synthesize agents that interact with that site. Drug candidates that affect CA bioactivity are also identified by screening drugs for the ability to either enhance or reduce the activity of the protein.

[0188] Positive controls and negative controls may be used in the assays. Preferably all control and test samples are performed in at least triplicate to obtain statistically significant results. Incubation of all samples is for a time sufficient for the binding of the agent to the protein. Following incubation, all samples are washed free of non-specifically bound material and the amount of bound, generally labeled agent determined. For example, where a radiolabel is employed, the samples may be counted in a scintillation counter to determine the amount of bound compound.

[0189] A variety of other reagents may be included in the screening assays. These include reagents like salts, neutral proteins, e.g. albumin, detergents, etc which may be used to facilitate optimal protein-protein binding and/or reduce non-specific or background interactions. Also reagents that otherwise improve the efficiency of the assay, such as protease inhibitors, nuclease inhibitors, anti-microbial agents, etc., may be used. The mixture of components may be added in any order that provides for the requisite binding.

[0190] Screening for agents that modulate the activity of CA proteins may also be done. In a preferred embodiment, methods for screening for a bioactive agent capable of modulating the activity of CA proteins comprise the steps of adding a candidate bioactive agent to a sample of CA proteins, as above, and determining an alteration in the biological activity of CA proteins. “Modulating the activity of an CA protein” includes an increase in activity, a decrease in activity, or a change in the type or kind of activity present. Thus, in this embodiment, the candidate agent should both bind to CA proteins (although this may not be necessary), and alter its biological or biochemical activity as defined herein. The methods include both in vitro screening methods, as are generally outlined above, and in vivo screening of cells for alterations in the presence, distribution, activity or amount of CA proteins.

[0191] Thus, in this embodiment, the methods comprise combining a CA sample and a candidate bioactive agent, and evaluating the effect on CA activity. By “CA activity” or grammatical equivalents herein is meant one of the CA protein's biological activities, including, but not limited to, its role in tumorigenesis, including cell division, preferably in lymphatic tissue, cell proliferation, tumor growth and transformation of cells. In one embodiment, CA activity includes activation of or by a protein encoded by a nucleic acid of Tables 1-10. An inhibitor of CA activity is the inhibition of any one or more CA activities.

[0192] In a preferred embodiment, the activity of the CA protein is increased; in another preferred embodiment, the activity of the CA protein is decreased. Thus, bioactive agents that are antagonists are preferred in some embodiments, and bioactive agents that are agonists may be preferred in other embodiments.

[0193] In a preferred embodiment, the invention provides methods for screening for bioactive agents capable of modulating the activity of a CA protein. The methods comprise adding a candidate bioactive agent, as defined above, to a cell comprising CA proteins. Preferred cell types include almost any cell. The cells contain a recombinant nucleic acid that encodes a CA protein. In a preferred embodiment, a library of candidate agents are tested on a plurality of cells.

[0194] In one aspect, the assays are evaluated in the presence or absence or previous or subsequent exposure of physiological signals, for example hormones, antibodies, peptides, antigens, cytokines, growth factors, action potentials, pharmacological agents including chemotherapeutics, radiation, carcinogenics, or other cells (i.e. cell-cell contacts). In another example, the determinations are determined at different stages of the cell cycle process.

[0195] In this way, bioactive agents are identified. Compounds with pharmacological activity are able to enhance or interfere with the activity of the CA protein.

[0196] In one embodiment, a method of inhibiting carcinoma cancer cell division, is provided. The method comprises administration of a carcinoma cancer inhibitor.

[0197] In a preferred embodiment, a method of inhibiting lymphoma carcinoma cell division is provided comprising administration of a lymphoma carcinoma inhibitor.

[0198] In another embodiment, a method of inhibiting tumor growth is provided. The method comprises administration of a carcinoma cancer inhibitor. In a particularly preferred embodiment, a method of inhibiting tumor growth in lymphatic tissue is provided comprising administration of a lymphoma inhibitor.

[0199] In a further embodiment, methods of treating cells or individuals with cancer are provided. The method comprises administration of a carcinoma cancer inhibitor. Preferably, the carcinoma is a lymphoma carcinoma.

[0200] In one embodiment, a carcinoma cancer inhibitor is an antibody as discussed above. In another embodiment, the carcinoma cancer inhibitor is an antisense molecule. Antisense molecules as used herein include antisense or sense oligonucleotides comprising a singe-stranded nucleic acid sequence (either RNA or DNA) capable of binding to target mRNA (sense) or DNA (antisense) sequences for carcinoma cancer molecules. Antisense or sense oligonucleotides, according to the present invention, comprise a fragment generally at least about 14 nucleotides, preferably from about 14 to 30 nucleotides. The ability to derive an antisense or a sense oligonucleotide, based upon a cDNA sequence encoding a given protein is described in, for example, Stein and Cohen, Cancer Res. 48:2659, (1988) and van der Krol et al., BioTechniques 6:958, (1988).

[0201] Antisense molecules may be introduced into a cell containing the target nucleotide sequence by formation of a conjugate with a ligand binding molecule, as described in WO 91/04753. Suitable ligand binding molecules include, but are not limited to, cell surface receptors, growth factors, other cytokines, or other ligands that bind to cell surface receptors. Preferably, conjugation of the ligand binding molecule does not substantially interfere with the ability of the ligand binding molecule to bind to its corresponding molecule or receptor, or block entry of the sense or antisense oligonucleotide or its conjugated version into the cell. Alternatively, a sense or an antisense oligonucleotide may be introduced into a cell containing the target nucleic acid sequence by formation of an oligonucleotide-lipid complex, as described in WO 90/10448. It is understood that the use of antisense molecules or knock out and knock in models may also be used in screening assays as discussed above, in addition to methods of treatment.

[0202] The compounds having the desired pharmacological activity may be administered in a physiologically acceptable carrier to a host, as previously described. The agents may be administered in a variety of ways, orally, parenterally e.g., subcutaneously, intraperitoneally, intravascularly, etc. Depending upon the manner of introduction, the compounds may be formulated in a variety of ways. The concentration of therapeutically active compound in the formulation may vary from about 0.1-100% wgt/vol. The agents may be administered alone or in combination with other treatments, i.e., radiation.

[0203] The pharmaceutical compositions can be prepared in various forms, such as granules, tablets, pills, suppositories, capsules, suspensions, salves, lotions and the like. Pharmaceutical grade organic or inorganic carriers and/or diluents suitable for oral and topical use can be used to make up compositions containing the therapeutically-active compounds. Diluents known to the art include aqueous media, vegetable and animal oils and fats. Stabilizing agents, wetting and emulsifying agents, salts for varying the osmotic pressure or buffers for securing an adequate pH value, and skin penetration enhancers can be used as auxiliary agents.

[0204] Without being bound by theory, it appears that the various CA sequences are important in carcinomas. Accordingly, disorders based on mutant or variant CA genes may be determined. In one embodiment, the invention provides methods for identifying cells containing variant CA genes comprising determining all or part of the sequence of at least one endogenous CA genes in a cell. As will be appreciated by those in the art, this may be done using any number of sequencing techniques. In a preferred embodiment, the invention provides methods of identifying the CA genotype of an individual comprising determining all or part of the sequence of at least one CA gene of the individual. This is generally done in at least one tissue of the individual, and may include the evaluation of a number of tissues or different samples of the same tissue. The method may include comparing the sequence of the sequenced CA gene to a known CA gene, i.e., a wild-type gene. As will be appreciated by those in the art, alterations in the sequence of some oncogenes can be an indication of either the presence of the disease, or propensity to develop the disease, or prognosis evaluations.

[0205] The sequence of all or part of the CA gene can then be compared to the sequence of a known CA gene to determine if any differences exist. This can be done using any number of known homology programs, such as Bestfit, etc. In a preferred embodiment, the presence of a difference in the sequence between the CA gene of the patient and the known CA gene is indicative of a disease state or a propensity for a disease state, as outlined herein.

[0206] In a preferred embodiment, the CA genes are used as probes to determine the number of copies of the CA gene in the genome. For example, some cancers exhibit chromosomal deletions or insertions, resulting in an alteration in the copy number of a gene.

[0207] In another preferred embodiment CA genes are used as probes to determine the chromosomal location of the CA genes. Information such as chromosomal location finds use in providing a diagnosis or prognosis in particular when chromosomal abnormalities such as translocations, and the like are identified in CA gene loci.

[0208] Thus, in one embodiment, methods of modulating CA in cells or organisms are provided. In one embodiment, the methods comprise administering to a cell an anti-CA antibody that reduces or eliminates the biological activity of an endogenous CA protein. Alternatively, the methods comprise administering to a cell or organism a recombinant nucleic acid encoding a CA protein. As will be appreciated by those in the art, this may be accomplished in any number of ways. In a preferred embodiment, for example when the CA sequence is down-regulated in carcinoma, the activity of the CA gene is increased by increasing the amount of CA in the cell, for example by overexpressing the endogenous CA or by administering a gene encoding the CA sequence, using known gene-therapy techniques, for example. In a preferred embodiment, the gene therapy techniques include the incorporation of the exogenous gene using enhanced homologous recombination (EHR), for example as described in PCT/US93/03868, hereby incorporated by reference in its entirety. Alternatively, for example when the CA sequence is up-regulated in carcinoma, the activity of the endogenous CA gene is decreased, for example by the administration of a CA antisense nucleic acid.

[0209] In one embodiment, the CA proteins of the present invention may be used to generate polyclonal and monoclonal antibodies to CA proteins, which are useful as described herein. Similarly, the CA proteins can be coupled, using standard technology, to affinity chromatography columns. These columns may then be used to purify CA antibodies. In a preferred embodiment, the antibodies are generated to epitopes unique to a CA protein; that is, the antibodies show little or no cross-reactivity to other proteins. These antibodies find use in a number of applications. For example, the CA antibodies may be coupled to standard affinity chromatography columns and used to purify CA proteins. The antibodies may also be used as blocking polypeptides, as outlined above, since they will specifically bind to the CA protein.

[0210] In one embodiment, a therapeutically effective dose of a CA or modulator thereof is administered to a patient. By “therapeutically effective dose” herein is meant a dose that produces the effects for which it is administered. The exact dose will depend on the purpose of the treatment, and will be ascertainable by one skilled in the art using known techniques. As is known in the art, adjustments for CA degradation, systemic versus localized delivery, and rate of new protease synthesis, as well as the age, body weight, general health, sex, diet, time of administration, drug interaction and the severity of the condition may be necessary, and will be ascertainable with routine experimentation by those skilled in the art.

[0211] A “patient” for the purposes of the present invention includes both humans and other animals, particularly mammals, and organisms. Thus the methods are applicable to both human therapy and veterinary applications. In the preferred embodiment the patient is a mammal, and in the most preferred embodiment the patient is human.

[0212] The administration of the CA proteins and modulators of the present invention can be done in a variety of ways as discussed above, including, but not limited to, orally, subcutaneously, intravenously, intranasally, transdermally, intraperitoneally, intramuscularly, intrapulmonary, vaginally, rectally, or intraocularly. In some instances, for example, in the treatment of wounds and inflammation, the CA proteins and modulators may be directly applied as a solution or spray.

[0213] The pharmaceutical compositions of the present invention comprise a CA protein in a form suitable for administration to a patient. In the preferred embodiment, the pharmaceutical compositions are in a water soluble form, such as being present as pharmaceutically acceptable salts, which is meant to include both acid and base addition salts. “Pharmaceutically acceptable acid addition salt” refers to those salts that retain the biological effectiveness of the free bases and that are not biologically or otherwise undesirable, formed with inorganic acids such as hydrochloric acid, hydrobromic acid, sulfuric acid, nitric acid, phosphoric acid and the like, and organic acids such as acetic acid, propionic acid, glycolic acid, pyruvic acid, oxalic acid, maleic acid, malonic acid, succinic acid, fumaric acid, tartaric acid, citric acid, benzoic acid, cinnamic acid, mandelic acid, methanesulfonic acid, ethanesulfonic acid, p-toluenesulfonic acid, salicylic acid and the like. “Pharmaceutically acceptable base addition salts” include those derived from inorganic bases such as sodium, potassium, lithium, ammonium, calcium, magnesium, iron, zinc, copper, manganese, aluminum salts and the like. Particularly preferred are the ammonium, potassium, sodium, calcium, and magnesium salts. Salts derived from pharmaceutically acceptable organic non-toxic bases include salts of primary, secondary, and tertiary amines, substituted amines including naturally occurring substituted amines, cyclic amines and basic ion exchange resins, such as isopropylamine, trimethylamine, diethylamine, triethylamine, tripropylamine, and ethanolamine.

[0214] The pharmaceutical compositions may also include one or more of the following: carrier proteins such as serum albumin; buffers; fillers such as microcrystalline cellulose, lactose, corn and other starches; binding agents; sweeteners and other flavoring agents; coloring agents; and polyethylene glycol. Additives are well known in the art, and are used in a variety of formulations.

[0215] In a preferred embodiment, CA proteins and modulators are administered as therapeutic agents, and can be formulated as outlined above. Similarly, CA genes (including both the full-length sequence, partial sequences, or regulatory sequences of the CA coding regions) can be administered in gene therapy applications, as is known in the art. These CA genes can include antisense applications, either as gene therapy (i.e. for incorporation into the genome) or as antisense compositions, as will be appreciated by those in the art.

[0216] In a preferred embodiment, CA genes are administered as DNA vaccines, either single genes or combinations of CA genes. Naked DNA vaccines are generally known in the art. Brower, Nature Biotechnology, 16:1304-1305 (1998).

[0217] In one embodiment, CA genes of the present invention are used as DNA vaccines. Methods for the use of genes as DNA vaccines are well known to one of ordinary skill in the art, and include placing a CA gene or portion of a CA gene under the control of a promoter for expression in a patient with carcinoma. The CA gene used for DNA vaccines can encode full-length CA proteins, but more preferably encodes portions of the CA proteins including peptides derived from the CA protein. In a preferred embodiment a patient is immunized with a DNA vaccine comprising a plurality of nucleotide sequences derived from a CA gene. Similarly, it is possible to immunize a patient with a plurality of CA genes or portions thereof as defined herein. Without being bound by theory, expression of the polypeptide encoded by the DNA vaccine, cytotoxic T-cells, helper T-cells and antibodies are induced which recognize and destroy or eliminate cells expressing CA proteins.

[0218] In a preferred embodiment, the DNA vaccines include a gene encoding an adjuvant molecule with the DNA vaccine. Such adjuvant molecules include cytokines that increase the immunogenic response to the CA polypeptide encoded by the DNA vaccine. Additional or alternative adjuvants are known to those of ordinary skill in the art and find use in the invention.

[0219] In another preferred embodiment CA genes find use in generating animal models of carcinomas, particularly lymphoma carcinomas. As is appreciated by one of ordinary skill in the art, when the CA gene identified is repressed or diminished in CA tissue, gene therapy technology wherein antisense RNA directed to the CA gene will also diminish or repress expression of the gene. An animal generated as such serves as an animal model of CA that finds use in screening bioactive drug candidates. Similarly, gene knockout technology, for example as a result of homologous recombination with an appropriate gene targeting vector, will result in the absence of the CA protein. When desired, tissue-specific expression or knockout of the CA protein may be necessary.

[0220] It is also possible that the CA protein is overexpressed in carcinoma. As such, transgenic animals can be generated that overexpress the CA protein. Depending on the desired expression level, promoters of various strengths can be employed to express the transgene. Also, the number of copies of the integrated transgene can be determined and compared for a determination of the expression level of the transgene. Animals generated by such methods find use as animal models of CA and are additionally useful in screening for bioactive molecules to treat carcinoma.

[0221] The CA nucleic acid sequences of the invention are depicted in Tables 1-10. The sequences in each Table include genomic sequence, mRNA and coding sequences for both mouse and human. The different sequences are assigned the following SEQ ID Nos:

[0222] Table I (mouse gene: Fscn1; human gene SNL)
[0223] Mouse genomic sequence (SEQ ID NO: 1)
[0224] Mouse mRNA sequence (SEQ ID NO: 2)
[0225] Mouse coding sequence (SEQ ID NO: 3)
[0226] Human genomic sequence (SEQ ID NO: 4)
[0227] Human mRNA sequence (SEQ ID NO: 5)
[0228] Human coding sequence (SEQ ID NO: 6)

[0229] Table II (mouse gene Map3k6; human gene MAP3K6)
[0230] Mouse genomic sequence (SEQ ID NO: 7)
[0231] Mouse mRNA sequence (SEQ ID NO: 8)
[0232] Mouse coding sequence (SEQ ID NO: 9)
[0233] Human genomic sequence (SEQ ID NO: 10)
[0234] Human mRNA sequence (SEQ ID NO: 11)
[0235] Human coding sequence (SEQ ID NO: 12)

[0236] Table III (mouse gene Fosb; human gene FOSB)
[0237] Mouse genomic sequence (SEQ ID NO: 13)
[0238] Mouse mRNA sequence (SEQ ID NO: 14)
[0239] Mouse coding sequence (SEQ ID NO: 15)
[0240] Human genomic sequence (SEQ ID NO: 16)
[0241] Human mRNA sequence (SEQ ID NO: 17)
[0242] Human coding sequence (SEQ ID NO: 18)

[0243] Table IV (mouse gene cmkbr7; human gene: CCR7)
[0244] Mouse genomic sequence (SEQ ID NO: 19)
[0245] Mouse mRNA sequence (SEQ ID NO: 20)
[0246] Mouse coding sequence (SEQ ID NO: 21)
[0247] Human genomic sequence (SEQ ID NO: 22)
[0248] Human mRNA sequence (SEQ ID NO: 23)
[0249] Human coding sequence (SEQ ID NO: 24)

[0250] Table V (mouse gene: Ccnd1; human gene: CCND1)
[0251] Mouse genomic sequence (SEQ ID NO: 25)
[0252] Mouse mRNA sequence (SEQ ID NO: 26)
[0253] Mouse coding sequence (SEQ ID NO: 27)
[0254] Human genomic sequence (SEQ ID NO: 28)
[0255] Human mRNA sequence (SEQ ID NO:29)
[0256] Human coding sequence (SEQ ID NO: 30)

[0257] Table VI (mouse gene: Ccnd3; human gene: CCND3)
[0258] Mouse genomic sequence (SEQ ID NO: 31)
[0259] Mouse mRNA sequence (SEQ ID NO: 32)
[0260] Mouse coding sequence (SEQ ID NO: 33)
[0261] Human genomic sequence (SEQ ID NO: 34)
[0262] Human mRNA sequence (SEQ ID NO: 35)
[0263] Human coding sequence (SEQ ID NO: 36)

[0264] Table VII (mouse gene: Wnt3; human gene: WNT3)
[0265] Mouse genomic sequence (SEQ ID NO: 37)
[0266] Mouse mRNA sequence (SEQ ID NO: 38)
[0267] Mouse coding sequence (SEQ ID NO: 39)
[0268] Human genomic sequence (SEQ ID NO: 40)
[0269] Human mRNA sequence (SEQ ID NO: 41)
[0270] Human coding sequence (SEQ ID NO: 42)

[0271] Table VIII (mouse gene: Batf; human gene: BATF)
[0272] Mouse genomic sequence (SEQ ID NO: 43)
[0273] Mouse mRNA sequence (SEQ ID NO: 44)
[0274] Mouse coding sequence (SEQ ID NO: 45)
[0275] Human genomic sequence (SEQ ID NO: 46)
[0276] Human mRNA sequence (SEQ ID NO: 47)
[0277] Human coding sequence (SEQ ID NO: 48)

[0278] Table IX (mouse gene: Irf4; human gene: IRF4)
[0279] Mouse genomic sequence (SEQ ID NO: 49)
[0280] Mouse mRNA sequence (SEQ ID NO: 50)
[0281] Mouse coding sequence (SEQ ID NO: 51)
[0282] Human genomic sequence (SEQ ID NO: 52)
[0283] Human mRNA sequence (SEQ ID NO: 53)
[0284] Human coding sequence (SEQ ID NO: 54)

[0285] Table X (mouse gene: Notch1; human gene: NOTCH1)
[0286] Mouse genomic sequence (SEQ ID NO: 55)
[0287] Mouse mRNA sequence (SEQ ID NO: 56)
[0288] Mouse coding sequence (SEQ ID NO: 57)
[0289] Human genomic sequence (SEQ ID NO: 58)
[0290] Human mRNA sequence (SEQ ID NO: 59)

[0291] Human coding sequence (SEQ ID NO: 60)

TABLE I

MOUSE NOMENCLATURE
ICSGNM Fscn1
Celera mCG232O8
HUMAN NOMENCLATURE
HGNC SNL
Celera hCG15970
MOUSE SEQUENCE - GENOMIC
CCTCTCAAACTCTTGGTAATTCTCCTGCTTCGGCACGCTGGGGACTGGGACTACACCTGTGTGCCACCATGGCTGGCTATTTCTCTCTCTTGAACAC
TGGAAGAGTGCTCAGAGTTTACTGGATCTGGGAGAAGCTCGAGGCTGGGTTATGGAAGCCGGCTCTGCTTGCTCCAGCTCAGGGAGGAGTTGCCTGA
GGGCCAGGCACTTCGAAGGACAGATGGGACCCAAGGCCAGACACTGGGCCCCAGCTCACCAGAAGTGGAGCCCTGACTGTCTCTGAGAGGGTAAGCT
GGGGTGGCTGCCAGGCGGGCAAGGCCAAAGCCTGGCAGCAGCCGGTGGCCCCTCTTCTGGCAGAGATATCTTGGCATGAGCCTGGCTCTGCCCATGA
CACTAAAGTGCCCTCTTAATTAGCCAGGCTCTTGCCAAGCACTGGCCACGATTGCCTTGTTTCACAGAATTCACCTTGGACTGGCACAGATGGGGAG
GGTGGATAGCCCGGTGTTTTGTCTTTCTTCTAGGGGAGCTGGGCTCAAGGGCAGGACTCCTGGGCCAGCCCAGGTTTTTCCCTCAGAAACCACAGCA
TGAATACTGGCATGATGGAGCACACCTGTAATCAGCAGAAATTGAGACAGGAAGATTGTTGAGAATTTGAGGCCAACCTAGGCTAAATAGGGAGACC
CTATCTCTACACACTCCCCCTCCCCCCGCCCCTGGAAATGCTGGAGGGTCTGGGGAAGATGGCTCAGTGGTTAAGGGCACTTGCTGCTCTTGCAGGG
GACCCAAGTTTGATTCCCAGCATCTATAACTTGGTGGCTCACAATTCCAGTTCCAGGCACTCTGACACCTTCCTGTGGTCTGCAAGGCACCTGCATT
CATTCTCACGTGCATGCGCACACACATGCGCGCGCGCACACACACACACACACACACACACACATCTCATAAATACAAATAAAATAAATCTTGAAAA
CAACAGTGACAACAACACATGCTGAACATGGTGGTGCTCCTGACATGGTGGTGCTCCTGACATGGTGGTGCTCCTGACATGGTGATGCTCCTGACAT
GGTGGTGCTCCTGACATGATGGTAAGCCTGACATGGTGGTGCTCCTGACATGGTGGTGCTCCTGACATGGTGATGCTCCTGACATGGTGGTGCTCCT
GACATGGTGGTAAGCCTGACATGGTGGTAAGCCTGACATGGTGGTGCTCCTGACATGGTGGTGCTCCCTGCACTGACAGTTCTGAGGAGGTGGAGAT
AGGAGGATCCAGACTTGGAAGCTTGCCTGAGATAGACCCTGTCTCAGAATAGGCTGGAGGCTGCCTCTGCCCTTTTGCTTCTATCTCTTTTTCCATA
TGTGTGTGTGCGTGTGTGCATATGTGTATGCATATTTGTAAGTATATGTATATAAATAAACACACACACACACAAACTTACTCTGTATACTAGGCTG
GCCTTGAACTCAGAGACCTGCCTGTTTCTGCCTTCCCAGTGCTGGGATTAAAAGCGTGTGCCATGGGCTGGTGAGATGGCTCAGTGGGTAAGAGTAC
CTGACTGCTCTTCCAAAGGTCCAGTGTTCAAGTCCCAGCAACCACATGGTGGCTCACAACCATCCGTAACAAGATCTGACGCCCTCTTCTGGTGTGT
CTGAAGACAGCTACAGTGTACTTAAATAAATAAATCTTAAAAAAAAAAAAAAAAAAAAAAAAAGGCGTGCACCACCACTGCCCGGCTAGTTAGCTTT
ATCTTCCGTGGATGTTTTGTCTGCAGTATGTCTGAGTGAGGGTGTCAGATCCTCTGTAACTGGAGTTATAGACAGTTGTGAGCAGCCATGTAAGTGC
TGGGAATTGAATCCGGGTTCTCTGGAAGAGCAGTTCATGCTCTTAAGCACTGCGCCATCTCTCCAGCTGTCCTTATTTATTTTTAAGGGTCTCTTGT
AGCCATACAGGCCAGAAACCCACCATTAGCCACGGACCTTGAGCTCCAAGTGCTGGGTGACAGGCCCGCATCTCTCCTGGTTTGTGATCTGCTAGGG
ATGGGGTCTAGGACCTCACACAGGCTGCATAAGCATTCCCCTCACCCACCCTCATCCCCACCCAGTCCTGGACAGGCTCTGGCTGTGTAGGCTGGTC
TCCTCCTTTCTATCCCCCTGCCTCAGCCTCCTGAGTGCTGAGGNNNNNNNNNNNNNNNNNNNNNNNNNNNNNNNNNNNNNNNNNNNNNNNNNNNNNN
NNNNNNNNNNNNNNNNNNNNNNNNNNNNNNNCTGTGGTGGCTCCCGAGTGCTGTCATCCCAGCACTGGGGAGGTTGAAGCAGGAAGGAGAATCACAG
GTTCAAGGCCAGCTTGGTTTACTTGAGACTCTGTCTCAAAAAGACCAAACCAGGGACTGGGAGGATGGCCAGTAAAATGCTTTTCCAGCTATCGAGG
GAACCTGAGTTTCATCCTGGAACTCATACAAAAAGCTGGCTGTGGTCAGGTGGCGCATGCCTTTAATCCCATCACTCAGGAGACAGAGGCAGGCAGA
TTCTTGAGTTCGAGGCCAGCCTGGTCTACAGACTGAGTTCCAGGATAGCCAGGTCTACACAGAGAAACCCTATCTTGGAAAACAAAACAAACAAAAA
AAACTAGGTGTGGCTAGCCTGTAACCCCAGTGCTGGGTAAACAGGGGCAGGTGAATACATCTCCGGGATTCGCCAGCCTGTCCTATCTATGAGCTCT
AGGTCTGGGGAGACAGCCTGTCAAATCAATGCAAGCAGGTGACAACCGAGGAAAGACACCCAAGGTTGATGCACGGGCAAGTGTGCACACACACACA
ATGAATATCTACCTGTGTAGCATATACATGCCGGGTACTTTCGGAGGTCAGAAGAGGACATCAAATCCCGTAGAACTGGAGTTACAGAAAATGAACT
TGTGGCTTCTGGGAATCTAACTTGGATCCTCTAAAGGACAGGCAGGACTCTGAATTCTTGAGCCACAGATACAGCTTTCCAAACCCATGTTTTGTAA
GAGCCACCAGGCCTGAAAACTCTGGGCCATGTCCCGTTTGTTGTGTCTAGGCCTCAGTTTCCTGGAAGGCAGAGAATGCGTAGGTCCGTTGTTAGTG
GAGACAGCAGTGGTGGTAACAGCCTGGTCTACCCTCTTGGTCAGAGGGAGGCAGGCGGAGAGTAACTCAGGGCCTGGGGGCAACACCCAGCTGGGCC
TGGGGCTAGTGGGGGCTCAGCCAGGCAGGACGTGGGTCCTCCTACTTCCTAAGCTCTGATGGGCAAGTGGTGCCAGTGGTACCAGGCTGCCCTGAGG
GGCCCTTAGAGCAGGTGACCACAGAGCCACAAAGAGGCTATTCATGGCCTCCGGTTCACGAGGCTGCCCCTTTATTGAGGGCTTGAACCACAGAAAG
CTGTGTGGTCTGCAGGGAAGCTAGTTCTGAGCTGTCTGGCCAGCTACAGTAGTGTGTGTGTGTGTGTGTGTGTGTATACACATGGTACTTTTTTCTA
TCTATCTATCTATCTATCTATCTATCTATCTATCTATCTATCTATCTATCTTTGTGTCTATGTATCTAATAATAAATTGATCTATTTAACTATGTAG
ATATCAATCCATTGATCTATGTATCTATCAACTGATGTGTATGTATGTATGGATGTACCTACATGCGTACTTGAGGCAGGACTTAAAGTAGCCCAGG
CTAGCCTTACCACATTTCATAGCAGAGGATGGTCTTGAACTTCAGGTCCTCCTGTCTCTACCTCGTGAGTGCTGGGATTACAGGTTTGTGCCACCAC
GCCTGGCTTAGGAGGTTCTGTGGTTAGAATCCAGGATTTCACTATCAACTGGGCCACATCGTCAGCCATATTCAATATGCTTTCTTTTACATTCTTA
CTTATTTACTACAAATGGGTCCCAGGAACCAAGGTCGGCAAGCCTGATGGTGAGTGCTCTTCCCTGCTGGCTGACTTATTTGCTCTTTTTTTTTTTT
TTTTTTTTTTCTAGACAGGGTTTCTCTGTGTAGCCCTGGCTGTCCTGGAACTCACTTTGTAGACCAGGCTGGCCTCGAACTCAGAAATCTGCCTGCC
TCTGTCCCCAACCCCACCCCCAGTACTGGGATTAAAGGCATGCGCCACACGCCCAGCTCTTATTTGCTCCTTTGAATTAAGGTCTCATGTACACAAG
GCTGACCGTTCATGCACAATACAGCTAAGGCTTGCTTTGAATTTCTCAGTTTCTTTCTTCTACCCAACAGTTTCTGAGATTTCAGGTCCGTCCTATG
TCATGCCCAGGTTTTTTGTTTGTTTGTTTGTTTGTTTTTTGGTTTTGTTTTGCTGTTTTTCAACACAGAGTTTCTCTGTGGAACCCTGGCTATCCTG
GAACTCTGTATACCAGGCTGTCCTTGAACTCAGAGACCCTCTGCCTCCCTAGTGCTGGGTTAAAGGTCCCTGCCATCACCGTGAAACTTAAGCCCAG
CTTCTCATTTGGTGGCTGGAAATTTGCCTGCCTCTGCCTCTCTCCAGCTGCCTAGCACTGATGTCTGGTTGAGAGCAGGGGAAACTGAGGTGCCGCT
AGGACAAGATCTCATGCAACCGTGAACAGCCCTACTGAGCCATCCTCCTGGGACAGCCTCTCAGGCCAGGCCTTCTGTGTCTTCTGCTATAGTAGCA
GTACAAAGTTGACACAACCTTGCTCTTCCCAGCAGCTGGGAGTTCCTGAGAAGTGTAAATGAGGTTTCCAGGAAAGCCAAGAGGTGAGAGACTGAAA
AGTTGGAGGGATAAGGGGGTGCCCATCAAGCTGCAGTGGAGACTTGTTATCTGTTGCGCATCCCTGACATCTCAGCAGGAGGATCAGGAGTTCAAGG
GCATCCTCAGCAACATAGTAAGTCTATGGAGCTAGCCTGGGCTACACAGATGCCATTACAAAAAAAAAAAAAAAAGTAAAAAAAAAATCTTGGGATA
TGGGGGATGGGTGGGTGAACTGTGTAGCCCAGGGAGTCACTACTGGTTCCTTTGGAAGTCCCTGTTCTGCATGGAGATCATGGAGATTCTGGGGACA
CTCCAGGAGTCCTCCTTCAGGGAACTAAGTTGGGGAGCAGGGCAGCCTATCCTGTGGCCTTATTTCCTGTCTGGTGCAAGCGCCAGGCAAGGCATCC
AGCCAGGAGCGACTCAGGCCTGACCTCCGCTAACTGTTCTGTTTTGTGCTGCACCCTCATCTCAGCAGGGATCAGGTGGCACTTGGGTCCCCAGGGG
ATCCAGGGACACAGTGTCCATGTCCCCATCTTTCCCCACAGGGACCTGGGGCAGGGCCGAAGAGGAGACCTCGTGATGTGTACAGGTGTAGCTCATC
CCTCCGAGGACTCAGGGGACACTTGGGGAAGGTGTGACACAGAGCAGGCTGGAGCTCTGTGCGGCTCTTTATTAAGTGTGCCTACAACAGGGGCAGA
GACACAGCAGCGACAATGATAACAGCCCACTCCCAACCGAAGCTCAATGGTTACCAGACTCAGCCAACTGCAGAATTCCAGTCCATAACGGCACCTC
CTTTCCTTTCTCAGGAGCTTACCAGAGAGGTCTCACCCCAAGCCTTCACCCCATCTAGAGCAAATGCTTATATCCCCCATGTTTGCTCAGAGCAGAG
CATGGAGGGACCTTCCTGTCACCAGAGGCAGAGGCATTCTGTATACGTGCATACACGCCTCTGTGTGTGTGTGTGTGTGTGTGTGTGTGTATTTGGT
ACAGATCTAAGCATAGAAAATTGAAAAGCATTGAGGTTGGTGATTGAAAGGCTCACTGATGGGCAAGTCGGGTTCGAGTGCGCTAACTGTATGACTC
TATGGATCCGAATATCATGCTGTTTTGGAAAGGAATGAGGGAGCTACTGTTTCTAAGGAAGAGAAGAATGGGCACCAAGACATAGGGAGGGAAGGTG
GGACAGTAAGCACTTACAGCCGAAGCCCAAGACCTGGAACCCAAGGGGAAAAACAGGTGTGGCCAGGCTTGGTGGCACGCGCCTTTAGTCTCTGAGT
TCAAGTCCAGCCAGGATTACATAGCAAAACTTTCCCTCAAGAAAAAAGGTAGGGGCTGGAGAGATGGCTCAGCAGTTAAGAGCTCTTCCGAAGGTCC
TGAGTTCAAATCCCAGCAACCACATGGTGGCTCACAACCATCTGTAATGAGATCTGACGCCCTCTTCTGGTGTGTCTGGAGACAGCTACAGTGTACT
TACATATAATAAATAAATAAATCCTAAAAAAAAAAAAAAAAGAAAAAGAAAAAGAAAAAAGGTAGAGGAGGAGGAAGAGGAGGAGGAGACGGCAAGA
CAAAACTAACTACATAGCTGGGGGAGGTGGTGCTTGCCTATAATCCCAGCACTTGGAAGGCTGAAAGAGGAAATCAGGAGTTCCTATGCAGCTTTGG
CTTATGTGAGCCTTTCTCATAAAACCAAGAGCAAAAAAGCAAAACATGAGGTGGTAACTCAGCTGGAGAGTGCTTGTCTAGATTCCCTCAGTGAGGG
GCTGGGGTGTGACTCAGTGCCTAGAATCCCCCAGGGAGGGGCTGGGGGCGTGGCTCAGTGGTAGAGCCCCTGCCTAGAATCCCCCATTGACGGGCTG
GGGTGTGGCTCAGTAACAGACTGCTCACCTAAGATGTTCAAGGCCATGACTTTCATTGAAAACATCACAAAACAAACAAAACCATCAGTGAGGTTGA
ATGTGTATCCATGTTTGCTTGTCTCCATTTAAAGAACACCTGGAAGATCTCTAGCTGCTGGTGGAGGCGGGAGGGTGAAGGCTGCTTCATCCTTTGT
ATTTGAACTGTGTGGCTGTGGGTGTATTATCTGTTCCCAAGGACTGCACATGAAATGAGAACAATGAAGGCTTCGGTTCTGCTGAGATGAACCTCAA
TTCTCCACAGATGATCTCACCCAGAGCCAGATGGAAGTCCCCCAACATTTAAGCCTCTGTTCTGAGTGCTGGACCCAAACTCATCTTAAGGGAAAAC
CCAAAGAGCCTTTCTGTGGTTTCCTTCCACAACTGTCTTTCAATGTGTGTATGTGTGCACGTGTGTTTGCTTGTGTGTGTGTGTGTGTACTATGTGC
ATGTGTGTGAGCATGTGTGTATATGTATGTGCATGAGTGTGTGTGTGTGTGTGTATACATGTGAGCATGTATGTATAGGCCAGAGGTTAGTGATGGG
TAACTTTCTCCAGAGCTCTCCACCTTAGTTTTATTGTCTGTGTGTGAGCGGCTGTGGGCACTGTACACCACAGCACATGTGTGGAGGTCAGAGAACA
ACTTGTGGCTGTCACTTCTCTCCCTCTGTGTGGGTCTAAGACCTGGATCCAGCGCTTTCGCTTGCTTGAGACATCTCGTTGACTAGCTCCTCCGTTG
TTAACACAGGGTCTCACTATGTAGGTCCAGTTATCTTGGAATTTGCTCTGTAGACCAGGCCGGCATCAAACTCAGAGATAGACCTGCCTTTGCCTCC
AGAGTACTGGGATTAAAGGTGTGCACCACTACCACCCAGTTTAAAATTCTAAAAAGATTTGTGGGTGCAGGGATTTGAGGAGGCCAGGAGAGACTGT
TGGATCTCTGGGAACTGGAGTTAGAGGTGGTTGTGAGCCCCCACGGGTGCTGAGAACTGAACTAGGGTGCTTGAGAGGAGCTCACTCACTGCTGAGC
CCCCACTTTAGATTTGAGTCCCTCGTACTGAAGCTGAGTTCAGTGATTTGGCTGAGCTGACCGCTCAGGGTGGGCTTTTCGATGTGCACCACAGGCC
TGGCTTTATAGGTGAGGTCATGCTTGCACAACTGGCCTTTTGGTGACTCAGCCAACTCCCCAGACCTTTTTTCTTTTGCATTTACGTGTGTGTGTGT
GTGTGTGTGTGTGTGTGTGTGTGTGTGTGTACATGAAGTGAGAGGGGGCAGTCTGGGAAGGGTCAGTGGACAACTTAAGGGAGTTGGTTTTGCCTTC
CATCATGATGGTCTAGAGACTAAATTCAGCCCCTCAGCCTGGGAGCGTGCCTTTACCCTCCGAGCTCCCAGCTTTGGGTTTTTGAGGCAAGGTTTCA
TATAGCTTAGGCTGGCCTGGCATTCAAGGTCATCTCAGAGGCCTAGGATGACCTTGTGTTGTCGGTTCTCCGGCCTTTACCTCTGGTGTGCTGGCGT
TTGCCTTACCACACCCAGGCATCCCCCATAGCTTAAGCCTAAAGCTCTCGGATGGCCAGCACGCCCATGCCCTGACGTGAAGTTCAGTGACTAATCA
ATACAGAGCGTTCACGGAGCCCTGACACATAGCAGCATTGACTTAACCTTAACAGCCTGGTGTGTAATGAGGCCAACTTGTCCGATTCTGCCCACGA
TGCGATGCTCTGGGTTAAACAGGTTTGAACAGAGTACCGGATGGCAGGGAGGGCACCCTCAGTACAGGGTTTTGGCTGTTACTGCTTCCAGTCTCCT
GACCTGCTCCCCCAAGGCTGGTCTTAAACTCAAAGCAATCCTCCTGTCCCTGCTTCTCAAGTTCTGGAATTACAAGTGTGACTCACTGTACCCAGGA
ATATGTGTCTTTATTACAGAGGAAGGAGAGCTCAGAGAGTGAGAGTAACCTGTGCAAAGTCCCACAGCAGGAGAGGGTGGCTGGCTATCGGCCGTGA
ACTTGGTGACCTTTCCTGTGACCTCTAAGGGAGGAACTAGATGTCCCAGCAAGGATTCTAGGGACTTGTCAGGACTGACCTTTGATGATGGGAAAGC
CATGCCATCTCCCCTTCCCCTTTGATGGTCGCTGGAGGGGTTTGCCTGGGACAGAGATGTGTTTGGACACAGATCACCGTGAAGACTGGTCAGTTTC
AGTACCCTGCCCAGCCTGTGGCTGGGAAGGGCCAGGGGCCCAGATCTTGTGGGCAGCCTGGGGTAGGGCCAGCATTCCAGGGGCCTGCCTGGCATGT
GGGGAATGTCCCAGGAGAAGTCTCAGTCCTCCAGAAACTCAAAGGGAAGTGTTCTTACGTGGGGTGGTGTGTGGTGGGAGGTGGGAGGTGGTGTTTG
TGGGAATGTCCCTCTGGTCTGGAACCCTGAGGGGCTGCAGTTAGGAGGTACATTGGGGCTGTGCCATTCTAGGGAGCTGACCTGCTTTTCTCATGTC
TTCATAAACAGAGACCACTATTCCTGCCTTACCTACCCTGGTTCCTGGTAGACCAGCACCCCGGGGCTTGAGCATCACCACAGTAGGGACTTTTGTG
GGCCACTGACTTGGGCCACAGTTACCACAATTTATTTAGAGTCAGCAAGGTGGCTGTACTCTATGCTGACCCGGGAATAGAAATCTCGGTTTCTGCT
CAGGAGGCCCAGGCTACAAGGCCTTGAAAAACCCTGAGGCGGGCGGGGCAGGTAGGGCTCTGCATGCGCCTCTCTAGAAATTAACCTCCTTTCTACC
CCAGACCCTTCTGGCGTCTCTGGCTTCTTCAAGGACCGGCTCTAAGGCTACTTCCTGGTACACCCTGGACCCTCCCTCCATCCTGAAGGGATCATTA
TCTTAAACCTGGTCCTTCCCATCGACTGGGTTTGGGGGTAGGGGTGTTTCAGGATGGCCTCAGAGAGCAGGAGAAAGTTGGAGATCAGCCAACTACT
GCAGAGCACGACTGTGGAGGAACAGTTAAATGGACTAGCAAACACGAACGGGCCAGAGGCAGAAGGACTGCTATGAGTTCGAGTCCAGCCTGAGCCA
CACAGATACTTCAAGCCTAGTCTGAGTTACAGAGTGAGACCCGGTCTTAAACCCCAGAAAAACACTCCGGGGAAGCGCAGGGGACCGGGCGCGCGCT
GCAGAGCCCCCTCCCCGGCAGGCCCGGGTAGGGGCGTGGCCACGGTGACGTCATCCTCCTATAAAACCCTGGGCGCCGCCGGGCTGGCTTTGTGGAG
AACTGCAGCGGGCTAAGCCGTGTTGAACAAAGGAGGTCGGGCACAGCTATCCAAGCTCCCGGGGCCACCGGGCCGCCCTCCGCCACCATGACCGCCA
ACGGCACGGCAGAGGCTGTGCAGATTCAGTTCGGGCTCATCAGCTGCGGCAACAAGTACCTGACAGCCGAGGCGTTCGGGTTCAAGGTGAACGCATC
CGCTAGTAGCTTGAAAAAGAAGCAGATCTGGACGCTGGAGCAACCTCCCGATGAGGCGGGCAGCGCGGCCGTGTGTCTGCGCAGCCACCTGGGTCGC
TACCTGGCCGCCGACAAGGACGGCAACGTGACCTGCGAGCGCGAGGTGCCCGACGGCGACTGCCGCTTTCTCGTCGTGGCGCACGACGACGGCCGCT
GGTCGCTGCAGTCCGAGGCTCACCGGCGCTACTTTGGCGGCACCGAGGACCGCCTGTCCTGCTTCGCGCAGAGCGTGTCGCCGGCCGAGAAGTGGAG
CGTGCACATCGCCATGCACCCGCAGGTTAACATCTACAGCGTTACCCGCAAGCGCTACGCGCATCTGAGCGCGCGGCCGGCCGACGAGATCGCGGTA
GACCGCGACGTGCCTTGGGGCGTCGACTCGCTCATCACCTTGGCCTTCCAGGACCAACGCTACAGTGTGCAGACGTCCGACCACCGCTTCCTGCGCC
ACGACGGGCGCCTTGTGGCACGGCCGGAGCCCGCCACGGGCTTCACGCTGGAGTTCCGCTCCGGCAAGGTGGCCTTTCGCGACTGCGAAGGTCGCTA
CCTGGCTCCGTCCGGGCCCAGCGGCACCCTCAAGGCTGGCAAGGCCACCAAGGTGGGCAAAGATGAGCTCTTCGCCCTGGAACAGAGCTGCGCTCAG
GTGGTGCTGCAGGCGGCCAACGAGAGGAACGTGTCCACGCGCCAGGGTGAGTTGGGGACATGTCCCCTCCCTTGGGTCCTGACCCAGTGCACAAAAG
CATCTCTGCACTCCTTCTATTTCCCTATTTCCTCCTGGGCTCCCTTTAGGCTCACAGGCCTCTGGGCTCCGCCATGGGGAGGTGGGCTTCTATTTTG
AAAGACCTGATCTCACCAGATAGCCTTGGCTATCCTGGAACTCGCTATGTAGACTGGGCTGGCCCCGAACTCGCAGAAATCTTCCTTCCTGTCTCTT
GTGCTGGGAATAAAGGCATGTACCACCCCTCTGTTCAGGACGTAGGCTTCTTCTGCTGGGAGAAGGTGACGTGGGGAAGTGGGTAAGGCCTAACACA
TTCTAAAGCAATACTGTCCACCACCACCCCCCCACCCCCCCACCCCCCCGGCTGGGGGCGTGGGACTCCATAGACCTAGCTTAGATCTTCTCCGTTT
CCTCTTCCTTCCCAGTCTGAGCCATCCCCATTCATGAGCCGATTCTTTAGGATAGGCTGTCCCAGGTCTTGGAGAGGAAGGGTTCCCCCTACACCCC
CCCTTGTTCATTTCCTCGTGCGTCCTCTCCCGTTTCGCGGGCCTTTGGCTGGAGGGCCAGGGGACAGTCACCCCTGCCCTCCCCGCCTTAAATGGCG
AGATAGAGGAGGTTGGAGGGGCTTTTGATCCCGGCGGGGTGTGCTGGGCGGGGTCGGCCCTGCGACTCTTGGTGGTGGTGGGGTTGTCCGTAGGGGC
TTCCCCTCCCCCACTCCATCTCCCCTCGCTAAGGCCTGGCGCTCCGGGCCGCGGCCTTTGTGAGCAGGGGGGCGGGTCGCCACGGCTGGGCCCTCCC
TCGTCCCCTTTGTCCTGCTAAGGCTCTGCAGATGGGAAAACCAGATGCGGCGGAGCTGGGGGAGGGGATCGGCTTAGGCGGGTCCCTCTGCGGAAGA
GCCACCCCCAACCCTCCAGGCGTTGTCCCTGGTCCAGGGTTCATTGAGAAGGCGCGGAGTGAAGCCGCCTGGCTCTTCCTTCGCACCCCGGCTGGCA
GGCGGCGTGGCGCGGGTGGCTGCGCGCCAGGCGCCCTCCCTGCCCTCCTATGCACGCCTTGCGGTCCGGCACTCGGCGGAGTGTCCCTCCAAAAGCC
TCTACTCTCGAGTGAACCGGTCCCCAAGGCCTCTCTGGCTGGGAACAACCGTTTGCAGCTCTATTTGTCCCCATCCAGGGCCTCCAGCAGGCTGGCA
GGCCATTTCCGACCGGCATGGGCATGGTACAAGTAGGCGCCTCCTTTCTGGCGTACCCCCGACTCTTCAAAGGGTCTTTGCTGCCTGCTGGTAGGGG
CTTGTGAGATCTCGCTTCCTTGGTTGGGAAACTGAACCCCAGGCTTTGGAGATAGCTGGATGGGAGCCAGTCTGTGGGGAGGAAGACCCCCCTCCCC
CAATGCAGAGGGCAAAGCCTTGGGTGGGGCCTGCTTGAGTTTGGCTGAATAACGCTCAGAAAAGTGCGACCATTTGCTTACTGTTACACAGTAAGTC
AGCACCATGCTGAACTGGGTGTACTTGATGCCAGAATGTTCTCTCATTATACACACACACACACACACACACACACACACACACACACACCAATGAA
CCATGGCCTCTCTTGTTTCACAGTGCTGGGCGAGGGGGTCAGAGTTCCCACCTGTTTAGCAAACATTGAGATACGAGCTGCGGTAAACGTCTCTTGG
GAATGTGACTGGTATGTAAAGCAGAAGATTGGGGGTACAGGATCGGGGTAGTAGATTATAAAGATCTGGGGTCCCTTCTGAGGACCCAGGAGCTGCC
CCAGGAGAGTGAATAGAAATGAGCATGCACCAAGTTTATGGACTGGTTTTGCAGGCAGGGGCCTCAGCAAAGGCCCGGAGGCAGGGAGTTGCAAATA
GAGAAGCCCTGCATAGCTAGGAGGAAGGCTGGGATTGGAGGGAATCCTGCAGATGACGGGTACTCCAGAGCCTAGAGAGACCAGCTCTCTGCTTACA
GAGCTGTGGCCGAGGCTTGTGCCCTGGGGAAGGTTAGGCAAGGCACAGGTGACTTGGGCCCTTGGGGCCTGAAAGGAGCTAGAGGGTGTGTTTTGCG
AGCCTGGACAGGTACCCTTTTCTGAGGGTGCCATGATTGTGCATGATTCACACTGATGCGGCAGGAGGGGGCGGGAATTGAAGGGGTGAGAATCTGA
CGGGAACTTGGGGTCACACACAGTCAGACCTCTTCTGCCCTCCTATGTCTGGGTCCAAGTCTCATTCCCGAGTCAGCCAACTCCTCCCCCGGCTTTT
TGAGGGTGAGCTGTTGGGTGGGTGTGCCGGGGAGGCCATTTTGGGCAGGCTTGCGTGGCAGGGAGGCGGGGCTGGGCTTCGGGGAAACACGTGTTGA
ACTGCTAGCCAGGAGTAGGGAGAGGGAAGGCTCAATCTGGTCTGGGGTTGTGAATCTTCCATGCAGATTTGCTGCTTCCGGCTTCCTGGCCTCAGTT
TCCCCATCTGAAAGCACAGAGGTACATTGAGCCAGGATCTTCCTGGGAGGTGGAGATCCTATGAGAGTAGGATGGGGGGTAGTGGGTAGGGTCTTTT
CCTCCTTGCTTCTCATGACCCTCCCAAGCCCCTGCTGGCTCAAGGAGACCCCGTGCTATGTCTCCCCACACTGCCCACCCTGGCTTACTTGTTGGGT
TCTAATGCTTTCAAAGAATTTTGTCCCCATCATTTGTAGGGCGGCTGGCTAAGAATGAGTGACAGGTGAGGCTGGGCTTTGTAGGGTATCCTTTTGA
CGGCTTCCCTCTTGGGTCGAGGAATGGCTTAGTTTTGAGCACTGTACGACTTTGGGCGGTGAAGTCCTGGAGGGTTCTAAACTAAGCCGCCTTCTGG
GTTGTGAGGATTGCTTATTTCGAACAACAACGCTAGGGAGTCTGGCAAACAGGTAAGCCCAGGAAGGGGGTTGCGGGTTAGAGGACCCTCTGAGTCA
CCGCAGAGACGCCTAGGAAGCTGGAAGACAGCCACGCCCCCTCCGTGGGGTCCTAGGAGCCAGTGACTCAGGTTTTCTGTGCTGCTGCTGCTGAAAA
AAAAAAAAATCCCACAGAAAACCTGTTACCATAGCAACGCAGCTCCAATATGATTCCAAGGCCAAGTGGGGCGTTTCCCCCTGGCTGAGCCTTAGAG
GGCCCATTCTGGAAGGGGGCTAACTTCCCTTTCCGGCTGAGGTGGGAGGGCCCACCATCTCCTTGGCAACAGGCCCTCACGTCCTTTCACGGTCCCA
ACAGAATTGAGAGGCGATTCTTTTTGGCAAGGGAGGGAAACTGAGGCAGAGAGCGGAGAAGACATTCCCCGAAGGGTGCCTGGAGTCCACCTTTGGT
GCCTTGGTGGCCTCTTTATTAAAAAGTGGTTGCACAGGCCCCTTTGTTCCAGTACCTGGAGATGAGACCCACATGGTGAGGCCCTTTTTGTTCTCTG
TCTGGACGTCTCATTTTTCAGAGGTACTGGGAGGTTGAAGGTTGGTGTATGTCCACAGCACTGTGCTGTCTTGAACTCAGTGCGCATGACATCTTGG
GCCAGGGCCTCTCCTTTGTGTGAGGGAAGCTAGCATGCTGGGAAACTCCGACTCCTTTAGTCCACCCACTTTAGTTGTAGTTTTTGTCTTGTAGCCC
ATCTGGCTTCCAACTCTCCATCCTCCTGCCTCAGTCTCCAGGGTGCGGCGATGACAGGCATAGGTCACCACAGGCTTCTGGCCTCCACTTGATGGTT
GCCGGAGTGGCTGGGAGTGGCTTTTCTTTTCTTTTCTTTTCTTTTCTTTACTTTCAGGCAGGGTTTATCTGTGTAGTCCGGCTGTTCTGGAACTATG
TNNNNNNNNNNNNNNNNNNNNNNNNNNNNNNNNNNNNNNNNNNNNNNNNNNNNNNNNNNNNNNNNNNNNNNNNNNNNNNNNNNNNNNNNNNNNNNNN
NNNNNNNNNNNNNNNNNNNNNNNNNNNNNNNNNNNNNNNNNNNNNNNNNNNNNNNNNNNNNNNNNNNNNNNNNNNNNNNNNNNNNNNNNNNNNNNNN
NNNNNNNNNNNNNNNNNNNNNNNNNNNNNNNNNNNNNNNNNNNNNNNNNNNNNNNNNNNNNNNNNNNNNNNNNNNNNNNNNNNNNNNNNNNNNNNNN
NNNNNNNNNNNNNNNNNNNNNNNNNNNNNNNNNNNNNNNNNNNNNNNNNNNNNNNNNNNNNNNNNNNNNNNNNNNNNNNNNNNNNNNNNNNNNNNNN
NNNNNNNNNNNNNNNNNNNNNNNNNNNNNNNNNNNNNNNNNNNNNNNNNNNNNNNNNNNNNNNNNNNNNNNNNNNNNNNNNNNNNNNNNNNNNNNNN
NNNNNNNNNNNNNNNNNNNNNNNNNNNNNNNNNNNNNNNNNNNNNNNNNNNNNNNNNNNNNNNNNNNNNNNNNNNNNNNNNNNNNNNNNNNNNNNNN
NNNNNNNNNNNNNNNNNNNNNNNNNNNNNNNNNNNNNNNNNNNNNNNNNNNNNNNNNAGAGAGAGAGATTGGGACTGACTGGTCCCAGTTCTGGCTT
TCCCTGACTGTTCCATTCCCCGCAGTGGGCACGGTTAGATCAGGTGGGGTCACTTAGGCTCGCTAGCATTGGGTGTGGCTCTTTTCTGCCCAGTATG
CTGTGCTAACTCAGCTGTCCCTGCACGTGGCAGGTCAATTACAGGTAGGCTGAGGGGACAGTGGGTGACACCCTGTATATGTGTAGCCAATTGTTCT
CTTAATATTTAGCCATCCCTAGTGTGGGCCAGGGGCAGGAGAGCCATTTCTGCCTGAGAAGGTTGAACAGACTACAGCCCAGAGCTGTGGCGTTGGG
GTGGCTGTCTAGCCTGGGATGGCCCTCCTACTCTCCTCTGTGCTTCAGTGGTAGATCCTGTGGAGGCACTGGGCCAGGGTCGTTGGGGACCCATCAT
GGAAGCCATGTCTGCTGATCCATATGTCTAGAAGGGGAGGCATCTGTCCATCCCCACTCCTGAAGTCAAGGGACCCCTTGGTCTTGCAGGGTGACCT
TGGGGCAAGGCCAGCCACCTCTGAGCTCCATCTTCTGCTTTGTGAGGTAGAGGTAAGAGCCTTTGGCATTGACAACACAGATAGAGACTCGGTTGGG
TCAGGGTGGCATTGGGTGGCATACTCTTGGGTGTAGTGTCAACTAAGGATGAGTTCCTAGGGGCAAGGCTGAAGGTGGCATCTACCATCCCATACCA
CGTTCTGCTGCCTAAGGACGCCTGAAGACAACTGTGAGACTGGCAGTGTACACTGCTTCGAAGGTGAGGACATTGTTAGAATCCCAGATCCTTGAAA
CAATGAGTTTATCTTGTTAGGACCCAAGATCCCACTCCTAGGTGGAGTCAAAGCCTTGGGAGCGGCACCTTATTGGGGCTCAGTGAGGTCATGTGAC
ATGGAAACCATGTAGTGTTACTATGTAGCAAGAAGTTAGAAAGCCATGCAACAAACCTGTAATTCCAACTCCTGAGGCAGAGGCAGGTGGATCTCTG
ATTTCAAAGGTAGCTCCAGATACACTGTGAGACCTTCTCAAAACAAGACAAGCAGACTGGAGAGATAGCTCAGAGGTTAAGAGCACTGGCTACTCTT
CTAGAGGTCCTGAGTTCAATTCCCAGCAACCAGTTGGTGGTCACAACCATCTGTAATGGGATTCGATACCCTCTTCTGGGGTGTCTGAGGAGAATGA
CAGTGTAGTCACATACGTAAAATAAATAAATCTTTAAAAAAAGAAAAGAAAAATGAAAAGGGAGGGGGGTGATGGAGACATGGCTCAGACAGTTTTT
TGTTTGTTTTGGCTTTTTGGTGTCTTTTCTTCTTTCTTTCTTTCTTTCTTTCTTTCTCTCTCTCTCTCTCTCTCTCTCTCTCTCTCTCTCTCTCTCT
CTCTCTTTCTCTATCTTTTCTCTTCTTGTCTTGTCTTGTATCTGTGTAGCAGCCCTGGCTACCGTGGAACTCACCTATAGGTCAGGCTAGCGTTGAA
CTCAGAGATCAGCCTGCCTTTGCCTTCCAATGCTGGGTTAAAGGTGTGCTCCAGCACTGTCCACTCTGGACCACTTGTTCTTGTATTCACCTAGTTC
TCACAGGGTGGCTCATGACAGTTCCAGGCGACCTGACCTCTTAGGGCACCAGGCACATGTGCGCATATTCATACACACAGGCAAGACGTTCACACAC
GArACATACAATACAAGACGTATCTTTCTAAAAATTAAAGAAAATAAATGAGAAGCGAGAGGGAAAGGAGGGAGAGCCACTGTTTGGACTGGACCAC
CACTGGCAGGGAAATGCCAGAAGGTTCAGACAGCATTCAGGGTTTGTGGCTGGTGGGGGCAGGGATAAAGGAGGAGTTTTCTAAAGGAACATGTGGT
CTGTGCGTGTGTGTGTGTGTGTGTGTGTGTGTGTGTGTGTGTGTGTGTTACTAGGGGTAGACTCCAGGGCCTTCCACCATGCTGGGCAAACAATTTA
CACTGAGCTATATTTTCGACCCCCTCTTTATTTTATTTTTATTTTATTTTATATATAGCTCTGACTGGCCTAGAACTCATTATGTAAACTAAGGTGA
CCTCAAACTCACCCATACTCAAATGAGATTCACCTGCCTCTGCCTCCTGAGTGCTAGAGACAGTCATGAAGCACCACGCCCACCTTCTCTTTAAAAA
AAAAAAAAAGCCTATTGCTTTTGTTTTTATTTTTGTCTGTGGAGGGTGGTGCCCACACCCAGTGGTGCCAGTTTGGAATCAGTTCTCCTGCCCTATT
CTACCTAGGGATCGAACGCAGGTGGGTAGGTTTGGCAGCAGCTGCTTTTACCCCACGAGCCATCTCGCTGGCCTGTAGCCCTTTGTGTGTCTGTCTG
TCTGTCTGTCTGTCTGCATGGAGTGGAGTCTCATGTAGCTCAGGCTGGCCTGCGAGTTATGATCTTCCTGACCCTGGTATCCAAGTGCGGAGACTGC
AGGCTCACTCTGCCACGCCCTTTTACACAGTTCTGGGATGGACTCTGCATGTCAAGTGAGTTATAGCCACGGCCCTATTTTATTTTATTATTTTTGA
GATCGGGCCCCACTCATCATGGAGGCTAAGGTCGGCCTCCTGAGTGGTGGGATGACAGGCGTGGGTCGATGTGCCTGGCTCCTACTCTATTCTTTTA
CTTTCACACATACCCACTACAGGAAGCGAGTAGCGAGCCCCCTTTTACCAGCACCCCGCCATGTGACATTCCGCAGAACCAGCGCCATCTGTGTGTT
TATTCAATGGTTTTGGTTGTATTTAAAGCAAATTCCCCACACTGGTGCTTCTTACCCGGAAACGCCTCCATCTGTAGCTACAAAACCAGGCCATTCC
TTACATAACGGCAGCGTTGCCTAAGTGGAACCGATCTTTAAGACCCAATCCAGGCCCACGGGAGAGTTCTGCTAGGCCTTAGAACATCTTTGTGGGT
GGTTCGTTTGAAGTTTGATGGCTTCCTTCCTCCCCTGCTCCCCTTTCTCCTTGCCATTTTGGGCACTAGAGTTTAAAGAAACCCGCCTGCCACTGAA
CTAAATCCCCAGATTTTTTTTTTTTTAAGTTTTTTTTCGAGACAGGGTTTCTGTGTGTAGCCCTGGCTGTCCTGGAACTCACTCTGTAGACCAGGCT
GGCCTCGAACTCAGAAATCCACCTGCCTCTGCCTCCCGAGTGGTGGGATTAATGTCTTATGTATCCCAGACTGGTCTTGAACTTGTGGTCATGCCTG
GAGTATCCTATTTTGATTGTTTATGTGTATACCCCTAATATGGATGTCAGAGATTCATATCATATGTGCCGTCTTTGGTCATCCTCCATACTTTTGG
GGGATGTATGGGGGCAGGGATGGAGTCTAGCCTGGGCTGTGGTAACACACGCTTTTCATTCCAGCATTAAAGCAGAGATAGGTCGATCTCTGAGTTC
TAGGACAGCCTGGGCTACACAGGGAAATTCTGTCTCAAAAAAAAAAAAAAACAAAAAGAAAGAAAGAAAGGAAAAGAAATAAGAGTCTCCCTATATA
GCCCTGGCTGTCCTAGAACTTATTATGTAGACCACGCTGGTCTTGGACTCACAACAGAGATCCATCTGCCTCTGCCTCCTGAATGTCCACTCTCTGC
TTGGAGACAAGAATCGCTCAGTGGCCCGGATTCAGGGATTCAGCTAAGCTGGCTGGTCCCTGAGCTCCAGGCCTCCATCTGTCTTGGCTTCCCTGTG
ACAGGATTATCGGCTCATGCCACCGCGCCTGGCTCTTACACCATTCCTAGCGATCTGAATTTAATACTCTATGGTCAAGCCATCCTTCAATGCTCCC
TCCCGTCCTGTTGAGACAGAGTCTTACTCACTCGGTAGCCTGGGGTCCCAGAACTCACAGTTAGTCTCCCGTTTGTTTCCTGAGTGGTGAGATCGTT
CCTGGCTAGCCTTGGCTGCTGATTTGGTAGCCTGGTCCCGCCCACTGCTTAGGATTATCACTGAGGAGTTTAAGCCACAGTTCAGGAAGCCCTGTGG
ATCCTGGAATCTGAGTGAGACAAGGGTCACACAGTGGCCTGACCGGCTCTGGTCTCTCTCTGCAGGAATGGACCTGTCAGCCAATCAGGATGAAGAG
ACCGATCAGGAGACCTTCCAGCTGGAGATCGACCGCGACACAAGAAAGTGTGCCTTTCGCACCCACACGGGCAAGTACTGGACAGTGACGGCGACCG
GAGGTGTGCAATCCACTGCGTCCACCAAGTGAGTGACACCCTACACCCCTTCATCACCTGGCCTGGCTCTTCCCCCAGGACTGGGCAGCCTGCTCGA
TGCCCCCACGTTGCCAGCCCCTCTTCTCTTCCCCAGGAACGCCAGCTGCTACTTTGACATCGAGTGGTGTGACCGCCGGATCACTGTGAGAGCCTCC
AACGGCAAGTTTGTGACCGCCAAGAAAAATGGCCAGCTGGCCGCCTCGGTGGAGACAGCAGGTAGTCACTTGGGGGCACGTACCCTAAGCCTGTTTC
CCTAGTACCCCGTGGTCAACCATCAGTCCCACCTGGACCTCTCTGTGTGTTCAGGGAATCCCTGTAAGCTGGTGTACCCTCAGGCCAGCAGCCTGTG
ACCCTTAGCTTCTTGGTATCCCTCTCTGCTGAGCCATTCCCTGACTGGCCCATCTTTGTTGCTGTGAAGCTCACTGGCTCCCTTTCCCTGTGGCAGG
GGACTCGGAACTCTTCCTCATGAAGCTGATTAACCGCCCCATCATCGTGTTCCGGGGGGAACACGGGTTCATTGGCTGCCGCAAGGTCACGGGCACT
CTGGATGCCAACCGTTCCAGTTACGATGTCTTCCAGTTGGAATTCAATGACGGCGCCTACAACATCAAAGGTGGGTTCACTGGGTGAGGATGCACCT
GGCCATTCAAAGCCGACATTAGGGAACGGGTGTCCTATGACCGCCTGGGGTAGCCCCTCCCCCCTTGTCTTAGAACTTTCCTGGCCCAACCTGGGCA
GACAGCGAAGGTGGGAAGCAGCTAGGGAGAGTGGCGTGGCTCCAATCTGGGAATCGGAGACAGGAGAATTATCTTTTTTTTTTTTTTTGGTGTTGAG
GACAGAACCCAGGGCTTTGAGCTTATTAGGCAAGCATTCTACTGCTGAGTTAAATCCCCAACCCCAAGAATCATCTCAAAAAGAAAGAAAGAAAAGG
GAAAAAGAAGGTGGAGCCTGGTGGTGGTGGTGGCGGCGGCGGCGGCACACGCCTTTAGTCCCAGCACTCAAGAGGCAGAGGCAGGTGGGTCTCTGAG
TTCTTGCCAGCCTGCTCTACAGAATACATTCTAAGACAGCCAGAGCTATGCAGAGAAACCCTGTCTCAAAAACAAACAAAAAAAGGGGGTGGGGAGA
GAAGATAGAAGATAAGGATATTCCTTCTTAGCTAGCTGTGGGACCAAAACCAGTGAGAGGACACAGCAATCCAGAGGTGTCAGTCAGAATCAGAGCC
CTGTGCTGTGTGTGGCCTTAGCAAGGCAAACGGGACTCCTTTCTTACAGTGCTGAGGACTGGAGTCAGAGCTAAGATCCAGCCCCTCCCTGGGGGAT
TCTAGGCAGGGGCTCTACCACTGAGCCACGCCCCCAGCCCCTCACTGGGGGATTCTAGGCAGGTGTTCTACCACTGAGCCACGCCCCCAGCCCCTCA
CTGGGGGATTCTAGGCAGGGGCTCTACCACTGAGCCACACCCCCAGCCCCTCACTGGGGGATTCTAGGCAGGGGCTCTGCTGCTGATATATGTCCTT
TTTGTTTGTTTACTTGTTTGTTTGTTTGTCTTATTGTGGCCCTAGCTGTCCTAGAACTTGCTTTGTAGACCAGAGATATACCTGTCTCTGCCTCCCA
AATGTTGGATTTAAAGGCATGTGCCACCATGCCCCACCCTAGCCTAGCCGTCTTATGTTTTGTAGTTTGAGATGGCATGTCAGTAGATTTCCCAGGA
TGGCCTTGAATCTAGGTAATCCTCCTGCCTCAGTTTCTTGAGTATTTGAATTATGGGACTGTACCTTACATCCAGCTGAGCCCACTCAGTTCTGGAA
GCTGACAGCGGGAGGGAGTGTTAATCCTTTGGGGACTGACAAGGTGGGGTTAACATGTAGTCTCCCTCCTCAGACTCCACGGGCAAGTACTGGACGG
TGGGTAGTGATTCCTCGGTCACCAGCAGCAGCGACACCCCTGTGGATTTCTTCCTTGAGTTCTGTGACTACAATAAGGTGGCTCTCAAGGTGGGCGG
CCGCTACCTGAAGGGGGACCACGCTGGGGTCCTGAAGGCCTGCGCGGAGACTATCGACCCCGCCTCACTCTGGGAGTACTAGGGCCACCTGCCCTCT
GCAGGCCGCTCTCGTCAGTCCCTCCTGTTATCCTTACTCATCGGGTGGCCCTGCAGCAGGTGGCAAACCCCTTGCCTTTCAAACTGGAAACCCAAGA
GAAAACGGTGCCCTTGCTGTCACCCTCTGTGGACCCCTTTTCCCTAACTCACTGCTCCCCATGGGTCGGTGGCTGCAGACTGTCCCCAGGAGGGACT
CTGGTTCCCTCTGTCCCCTTCTTTCCATGGGGAACTCTGGCACCTTTCTTCTGACCTCAGTCAACTCTGAGCCTTATTTCCCCCCAGGAAGTGGCCT
AGGAGAAGCTACAGGGCCTAGGGACTTACCCTGAGCTTGTAACTGGAAGACCCCGTCCCTATCCCCGCTCCCGCCCCCACCCCACCCCACCCCTGCT
CTGGCCCCAGCCTCTGGAGGCCAGCCTTTTGGAGGGACTGAAGCCGGGCATGGCCAACCTTGCCCACAAGTGTTTTTCTGGATCTTGGCTGGAAGGC
AGTCTGTCCCATCCTGCAGTGTTTGGGCCTGGCTCTTTGACTCAAAGCTAGCTAGGTGGCACTCCGTGTCGCTCCTGCACATTCTGGAAGGGGCGGG
CCTCTCACCCACCTCATTCCTTTTCCCCCTGGCCTGACTGGAAGCAGAAAAATGACCAAATCAGTATTTTTTTTTTTTTTCTTTAAGGAAATGTTAC
TGTTGAAAGGCCCTAGGCAAGCCTGCCCTGTTGGTTGTAGTCGTGAGTGGTCTTGGGGGGAGATGCTTGGCTCCTGTCCCTGCCTCCCCAGCGGGTT
CCCTCCCTCCCTCCTGCCTGACCACCCCAGCTCTGGCTCTGTGATTGGTGCTCCACGTCTTCCCAGACACCTCGGGGCTCGTGGGCGGGAGAAAGCC
GGATGTGCCCCTCCCTGGGAGCCCTGGAGTAAACCTCAGGGGGCCCTTTCCCAATCACCCCCTTCCACCGACCCCTCAACACCATGCATCTCACTCT
GGGTGTCTCGCTCCTTTATTTTTTTGTAACTGTCATTTCTATAACTCTGAAGACCCATGATAGTAAGCTTTGAACTGGAAAATAAAGTAAAATCAAG
TCTGCGGCCCGTGTGTGTCTCAGGGGAAGTGGATGCTGGAGTGGGCAGAGGGCCGGCTGGGAGGGAGGCAGCGCTGATTGATTGGCAGCCCGCAGAC
TCTTGTTTCGGTCTCGGACCCTAGCGGCTTCAGCATATGCCTTAGTAACTCTGGACTGAGAAATGGCTGACACGAGGTTCCCGAGCCTTACAAGCTG
GGCAGGCTAGAGGGTTCAGCAGGTAAAGTTGTGTGGTGTCAAGCTTGATCAGACTGAGTCCCCAGCACCGTGTGAAAAGTTGGGCACAACGGTGTAC
ACCCACCCCAGGGCCTCTGGCAAGCACAGAGACAAGAGGATCCTTGGAGCCTGCTGGCGGCCCAACCTTGCCCAATCTGTGATTCCCATTGAGTGAG
CCATAAGGTGGAGATGGGTTTTGGAAGATACCCCACATAGGCCTGCGGCCCCCCACACCCGGAAATAAAAACAAGCCAGGCTTGTCATCCCAGTTAT
TCGGGGAGCTGAGGCAGGAGGATCACAGATTTAAGACTGCCCAGGTTGAAGAGTAAGTTCAAGGGCAGCCTGGACATCTTGCTAGATTGTTTTTTTG
TTGGTTGGTTGGTTTTTGTTTTGTTCTTTTTTTCGAGACAGGGTTTCTCTGTGTAGCCCTGGCTGTCCTGGAACTCACTCTGTTGACCAGGCTGGCC
TCGAACTCAGAAATCCGCCTGCCTTTGCCTCCCGAGTGCTAGGATTAAAGGTGTGCGCCACCATGCCAGGCTTAGATGTTTTAAATGAAGGGCTGTG
GAGTGTGGTTCACGGGTAGCCTCGCTCAGACAGGCTGGGGCAGGAGAAATGGATGGCTCAGCATTGGCTGCTGCCTTAGGGTTTCCATTGCTGTGAA
CAGACACCATGACCTGGCAGCTCTTCTGAAGGACATTGGACTGGGGCTGGCTTACAGGTTCATCAAGGCAGGAAGCAAAGCACAGGCATGGTGCAGG
AGGGGCTCAAGTCTACGACCCGGGTCTCAAAGCCCACCCCCACAGTGACAGACTTTCTCCAACAAGGCCACACCCACTCCATCAAGGCCACACCTCC
TAGTAGTGCCACTCCTTGAGCCAAGCTTATTCAAACCACCAATCACAACTGCTTTTCTAGAGGACCCAGGTTCAATTCCCAGCATCCACATGACAGC
TTACAATTGTAACTACAATTCCAGGGGATCCAACACCCTTACACAGGCACACTTACAGGAAAAGCACCAATCAGTGCACATAAAAATACATAAATCG
TTAGAGAGAAGAGACCATTAGCTACCTTCACCCTTAACAGGCAAGCTGAGGTCCTGGGAGTGTGTTAGAGGTCCGCAGCTTGGAGTCTATAGGGTAG
TGGCATCGTCTATACGTTCCTTCCTTGACAGGTAGGTACTTAGCTGAGACCTCTGGGGTATCCCAGAGACCCATTTTACAGAGGGAGGCACTGAGGC
GGAGGGAAAAGACAACCTTGTTTGCTGGCTCAGAAGAGTGCCAGTGGGGTACCCACCCACAAGGCTCAGCATCCCGAGGCACTGTGGAGGCAGTTAC
AAAGCCGCATTGATTGGCTGCTGATGACGAAATGAAGAGCCCCGCGGTGTGATTGGCGGTCCCAGAGGGAAGGCATGTGGGGAGATTGACAGGGGCA
GATGGCCACAAAGGGTCCAGTGACTTCCCGCAGGGTGGAAGCTCTGGGCCCAAGCCAGTAAAGTGTCAATGACATGGAGAGACAGATGAATCCTTCC
CAGTTGAATTCTCAGGCTCTGGTGGGGCCGCGCTGGGGAGAAAAGACACCCTGTCCGTTACAACCACCAAGCGCAGCCAGGCTACGTGATGACTGGG
GGAAGTCCCAGACGTGACTTCCTGCAGCACTGGAGGGGAGGGTCCGACGGAGGAGGCTGAGAGTCTGTTGGAGGCAGCCGAGGATCGGAGGGAAGAG
GCACAGGTCTTACATGGGAGGCATAAAGTCTGGTGGGAGTCCAAGGGAGGACGGATGTAGGGTGATGGGAAGAAAGGACCTAATCCAGAAAAAGGAA
CAGAAGAGCCACCTACCTGGTTAGGGGACGCTGGCCCTCCGCAGGGAAAGCTGTCAAAGAAAGGCCTGGCTAATGAGACCATGTCGTGGGGGGCCCA
GGCAACTGTGGAGGCATCAGACACCTTGGGGCAAGGAGGGCACCCATGAGCTAGTACACACCACTAAGTATCTCAGAGTCCTGCACACACACTCATT
GACACAGGTGGGTGAGCAGCACCCACGGGCAGCTGAAGCTGAGTATCCTGCCCGCCCCTTTGTTTCTTCCAACTGAGCAGGGACAAGAAGGATCCCT
ATGAATATGGCTTTTTTTGTTTGTTTGTTTGGTTGGTTGGGTTTTTGACTTGGTTTGGTTTTTCCAGACAGGGAGTAAAGACATACACCACCATAAC
CCAGCTTTGTAAATCTGGTTTTTGTGTGTGAACCTATGAATTCCACTCCTGTTGCACTGATGGGAAATTGAGGCAAAGTCTCAAAGAAGCTGACAGC
ACAGGCTAGTGTGTTCATTTTCTCTCTACAAAAAGAGGAAAAATTGGGGCTGGTGAGATGGCTCAGCGGTTAAGAGCATTGACTGCTCTTCCAAAGC
AGGTCCCGAGTTCAAATCCCAGCAACCACATGGTGGCTCACAACCATCTATAATGAGATCTGAGACCGTCTTCTGGGGTATCTGAAGACAGCTACAG
TGTACTTAGATATAATAAATAAATAAATCTTTAAAAAAAGGAAAAATTATTTATTATTTTATTATTAAATTAATTGTTGTATTTATTTATTTTATTA
ATCTATATTTAATTTATTTTTTTATTTTGTGTGCATGAGTGTTTTGCCTGCATGTGTGTGCACTACCTGTGTGTCCACTGCCTATGGAGGTCAGAAG
AAGGCGTTGGGTCCGGGAACTGGGGTTGTATGGTTGTTAGCCGCCGCGTTCATGCTGGTTCTCTGCGAGGCGGCACTTAGTCCTGAGCCATGTTCTG
TCAGCTCCTCTACTTTCTTTTAGACAGGGTCTCCTGTAGCTCAGGCTGGGCTTCAGCTTGCCTGGTGGTTAAGGGTGACTAAGTTAAATCATCTTAC
ATTTCTGCCTCACTTCCACCTCCTGAGTGCTGGGCTTGCAGGCATGTGCCACTGGGATGGGTTTTGTTTCCTGCTGGCTTCTCACCCCGTAGCTCCG
TGTGTTGGGTCAGGGCCAGCCCTGTGCCCACTGAGCCATTAACCCTACTGAGCCCACTGTAGGGAAAAACCATAGAGGAGCTTCTATGACCCTCATG
GGTCCCTCCAGGTCTGTCAGAGTTCAGGAGGCATGGATCTCTCTGGCAGGGAGCTGTTGACTTTAGCCTTGGAATTTCCCAACCAAGTCTACACTGA
GCACCCTGTCGACGACCTGCTTCTGACTCCTCCTGTGAGGCTCTTTTGGAGTGATCTTAGTCCCCACAGGGCCCCCATCTTCTCCAGAGCTGAGTGG
CCTCTCCTACTGGACAGAGAAGAGCTGTCCTGACTTGGTTAAAATGTTGAATGCAAGGAGCGGAGGAAACGGCCCAGCTGGTGAAGTGTTTGGCTCG
ATCCCCAGAGCTGTGGAGTTCCCAACAGGATGGGGCTCACTGGCTGCCCTGATCAGCAAGCTCAGAAACCAAGATGGATAGCTCCTAAGGACTGGAA
TTGGAGGATGACCCCTGGTGACAGACACACTTGCATATGCATCTGTCTGCACACATACACATATGCATGTAAAACCCTGATCCACGTGGTAGTGCCT
GACTGTAATCCCAGTACTTGGGAGACAGGAACAGAGAATCACCTTCAGTTTGAGGCCAACCTCGTCTACATATCCAGCACCTTAGGAGACTCTGTTT
CCAACTCTTCAGGGTGGCTCACATCTCTAATCTCAACCCTCAAGAAGCCAAGACTGGAAGATGCCTAGAGAGGAAGGTTTGCTTGGGTTCAGTGCCA
GCCTCCAGAGGCAGAGGCAAGCAGATTTCTGAGTTCGAGGCCAGCCTCTACAGAGTGAGTTCCAGGACAGCCAGGCAGCCAGGGCTATACAGAGCAA
CCCTGTCTCAAACAACAACAATAACAACAACAACACAACAAGAAAACTTGAGTGTGCGTGTGCGTGTGCGTGTGCGTGTGTGTGTGTGTGTGTGTGT
GTGTGTGTTTACTATTTACAGTAAACGAGTCTTTGGGGAGGCAGCCAAAGTAGGCGAGGAACTCCTTGTCCCCTGCTGGGCTCTCTGGGTTGAGATC
TTGTCTTGATGGGGAGATAGGAAGGGATTCTCTGTCCCTCAGGGTGCTATCAGCAGTGGGAACAGATGGGGTCGGGAGAGAGACTGGGGGAGGGGAG
AATCAGGGTGGAGGAGGGCTGTGATTTAGGTTTACCATGAAACCGGAGTCATCACCGGTGGGAGAGGGTGGTCAGAGTTCCTCTTTTTTCCTCTTCT
TTCCCTAGGACCCAGGCCTGATCCGGTGGGGAGGGGAATGATTGGAAAATGCTGCGTTCTAGAGTCCCTAGCGAGAGCCACACCCCAGGCCTCAGCC
ATCAATGACAACCTTTGTGTTCTCACTGAAAGCAATTAAAGATCTGTAAGATGAGTCAGTGTTACCCATTGTAAGCTGCTGACTGCCTTGGTCCCAT
CCCTGGGACCCACATGGTGGAAGGAAAGAATGGACTGATGCCCTTGGACCCCCACGTGTGTGCTGTGGCACACACACACACGCATGCACACAAAAAT
AAGTAATGTAGTTCAAAATTTAGAATAAATCAGGCGTGGTGGTGCACACCTTTAATCCCAGTAGTCGGGAGGCAGAAGCAAGTAGATCTCTGTGAGT
TTGAGACCAGCCTGGTCTACAGAGTGAGTTTCAAGCCAGCCATAGATAGCTACATAGCCAGATCTTGTGTTAGCCTCCTCCTTCTACCAACAGAAAT
TAAGATCACAAATAAACAGGAAAGAGGGTGGAAGAGACAACTCAGTGGCTATGAACATTTGCTGTTCTTGCAGAGAAACCAGGATTGAGTCCCGGCA
CCCACATAGTGGGTAAACATTATCTCTAGCTCAAATTCCAGAGGACCTGGCTTCTGAGAGCACGGTACACATGGGGTGTTCTCTCTCTCTCTCTCTC
TCTCACACACACACACACACACACACACACACACACACACACACGCAGGAAAAACAGAAAAGCACATAAAATAAAAACAAATATATAAAAATAGAAT
CCAAGGGGATTCAACGATGTCATGAGTCCACAGAAATCCTATCCTCCCCTTTTTCGGGGTGTTACACGGGCGGATCAAACCCAGGGNNNNNNNNNNN
NNNNNNNNNNNNNNNNNNNNNNNNNNNNNNNNNNNNNNNNNNNNNNNNNNNNNNNNNNNNNNNNNNNNNNNNNNNNNNNNNNNNNNNNNNNNNNNNN
NNNNNNNNNNNNNNNNNNNNNNNNNNNNNNNNNNNNNNNNNNNNNNNNNNNNNNNNNNNNNNNNNNNNNNNNNNNNNNNNNNNNNNNNNNNNNNNNN
NNNNNNNNNNNNNNNNNNNNNNNNNNNNNNNNNNNNNNNNNNNNNNNNNNNNNNNNNNNNNNNNNNNNNNNNNNNNNNNNNNNNNNNNNNNNNNNNN
NNNNNNNNNNNNNNNNNNNNNNNNNNNNNNNNNNNNNNNNNNNNNNNNNNNNNNNNNNNNNNNNNNNNNNNNNNNNNNNNNNNNNNNNNNNNNNNNN
NNNNNNNNNNNNNNNNNNNNNNNNNNNNNNNNNNNNNNNNNNNNNNNNNNNNNNNNNNNNNNNNNNNNNNNNNNNNNNNNNNNNNNNNNNNNNNNNN
NNNNNNNNNNNNNNNNNNNNNNNNNNNNNNNNNNNNNNNNNNNNNNNNNNNNNNNNNNNNNNNNNNNNNNNNNNNNNNNNNNNNNNNNNNNNNNNNN
NNNNNNNNNNNNNNNNNNNNNNNNNNNNNNNNNNNNNNNNNNNNNNNNNNNNNNNNNNNNNNNNNNNNNNNNNNNNNNNNNNNNNNNNNNNNNNNNN
NNNNNNNNNNNNNNNNNNNNNNNNNNNNNNNNNNNNNNNNNNNNNNNNNNNNNNNNNNNNNNNNNNNNNNNNNNNNNNNNNNNNNNNNNNNNNNNNN
NNNNNNNNNNNNNNNNNNNNNNNNNNNNNNNNNNNNNNNNNNNNNNNNNNNNNNNNNNNNNNNNNNNNNNNNNNNNNNNNNNNNNNNNNNNNNNNNN
NNNNNNNNNNNNNNNNNNNNNNNNNNNNNNNNNNNNNNNNNNNNNNNNNNNNNNNNNNNNNNNNNNNNNNNNNNNNNNNNNNNNNNNNNNNNNNNNN
NNNNNNNNNNNNNNNNNNNNNNNNNNNNNNNNNNNNNNNNNNNNNNNNNNNNNNNNNNNNNNNNNNNNNNNNNNNNNNNNNNNNNNNNNNNNNNNNN
NNNNNNNNNNNNNNNNNNNNNNNNNNNNNNNNNNNNNNNNNNNNNNNNNNNNNNNNNNNNNNNNNNNNNNNNNNNNNNNNNNNNNNNNNNNNNNNNN
NNNNNNNNNNNNNNNNNNNNNNNNNNNNNNNNNNNNNNNNNNNNNNNNNNNNNNNNNNNNNNNNNNNNNNNNNNNNNNNNNNNNNNNNNNNNNNNNN
NNNNNNNNNNNNNNNNNNNNNNNNNNNNNNNNNNNNNNNNNNNNNNNNNNNNNNNNNNNNNNNNNNNNNNNNNNNNNNNNNNNNNNNNNNNNNNNNN
NNNNNNNNNNNNNNNNNNNNNNNNNNNNNNNNNNNNNNNNNNNNNNNNNNNNNNNNNNNNNNNNNNNNNNNNNNNNNNNNNNNNNNNNNNNNNNNNN
NNNNNNNNNNNNNNNNNNNNNNNNNNNNNNNNNNNNNNNNNNNNNNNNNNNNNNNNNNNNNNNNNNNNNNNNNNNNNNNNNNNNNNNNNNNNNNNNN
NNNNNNNNNNNNNNNNNNNNNNNNNNNNNNNNNNNNNNNNNNNNNNNNNNNNNNNNNNNNNNNNNNNNNNNNNNNNNNNNNNNNNNNNNNNNNNNNN
NNNNNNNNNNNNNNNNNNNNNNNNNNNNNNNNNNNNNNNNNNNNNNNNNNNNNNNNNNNNNNNNNNNNNNNNNNNNNNNNNNNNNNNNNNNNNNNNN
NNNNNNNNNNNNNNNNNNNNNNNNNNNNNNNNNNNNNNNNNNNNNNNNNNNNNNNNNNNNNNNNNNNNNNNNNNNNNNNNNNNNNNNNNNNNNNNNN
NNNNNNNNNNNNNNNNNNNNNNNNNNNNNNNNNNNNNNNNNNNNNNNNNNNNNNNNNNNNNNNNNNNNNNNNNNNNNNNNNNNNNNNNNNNNNNNNN
NNNNNNNNNNNNNNNNNNNNNNNNNNNNNNNNNNNNNNNNNNNNNNNNNNNNNNNNNNNNNNNNNNNNNNNNNNNNNNNNNNNNNNNNNNNNNNNNN
NNNNNNNNNNNNNNNNNNNNNNNNNNNNNNNNNNNNNNNNNNNNNNNNNNNNNNNNNNNNNNNNNNNNNNNNNNNNNNNNNNNNNNNNNNNNNNNNN
NNNNNNNNNNNNNNNNNNNNNNNNNNNNNNNNNNNNNNNNNNNNNNNNNNNNNNNNNNNNNNNNNNNNNNNNNNNNNNNNNNNNNNNNNNNNNNNNN
NNNNNNNNNNNNNNNNNNNNNNNNNNNNNNNNNNNNNNNNNNNNNNNNNNNNNNNNNNNNNNNNNNNNNNNNNNNNNNNNNNNNNNNNNNNNNNNNN
NNNNNNNNNNNNNNNNNNNNNNNNNNNNNNNNNNNNNNNNNNNNNNNNNNNNNNNNNNNNNNNNNNNNNNNNNNNNNNNNNNNNNNNNNNNNNNNNN
NNNNNNNNNNNNNNNNNNNNNNNNNNNNNNNNNNNNNNNNNNNTGACTGCTCTTCCAAGGTCTTGAGTTCAATCCCAGCAACCACATGGTGGCTCAC
AACCATCCGTAATGAGATCTGACGCCCTCTTCTGGTGTGTCCGAAGACAGCTACAGTGTACTTACATATAATAAATAAATAAATCTTAAAAAAAAAA
GAAAGAAAGAAAGAAAGAAAGAGAGAGAGAAAGAAAGAAAGAGGTGAGGGCTGGGTGTGGTGGCGCACACCTTTAATCCCAGCACTTGGGAGGCAGA
GGCAGGTGGATCTCTGTGAGTCTGAGGCCAGCTTGGTCTACAGAGTGAGTTCCAGGACAGCCAGGGCTACACAGAGAAACCGTGTCTTGAAAGAAAG
AAAGAAAGAAAGAAAGAAAGAAAGAAAGAAAGAAAGAAAGAAAGAAAGAAAGAAAGAAAGAAAGGAAGGAAGGAAGGAAGGAAGAGGTGAATAGGAT
AAAATGAGGTCCAATAGGTTGGGGGCATGGCTCAGTGTTAGAGGGCTTGCCTAGCAAGTGAGAGGCCTGGGTTCAACCTCTGGCACTGAAGAGGGAT
GGTAGGTAGGTAGGTAGGTAGGTAGGTAGGTATCTAGATAGATAGATGATAAATAGGTAGATGGATGGTAGATATATAGATAATAGATGTGGGATAG
ATAGATGATAGAGATATACATAGATGATAGATTATAGATAGATAGATAGATAGATAGATAGATAGATAGATAGATAGATAGACAGACAAATGGTAGG
TATATAGATGATAGAAAGATGAGGGATAAATAGATGGTAGATAAGTAGATGATAGTAGGTAGATGAGAGGGAGAGAGAGAGAGAGCGAGAGAGAGCG
AGAAAGGATATAATAAGGTCATTAGGCTAATTTGATCCAAAGACAGATTGGGGTTCTTATAAGACAAGTGATCAAGCAGGCCAGATATGGGGGGAAC
TGATCTGTAATTCTAGCACCTGGGGTGGGAGATGGAGGCAGGAGGAAGGGGAGGTCGAGGGTATCCGGAGATACTTAGTGAGTTTGAGGCTATCCCC
AGCCACGTGAGACTCTGGCAAATCCTTCCGCACTAACAACAAAAATTCTGAAAGGCAAACCTCCCTTAACTCATAAAGCATGAATTGGGGCGTATGC
GGGCCTTCAGAGCCATGTGGTGTGTTTGGGAACAGACGACAGGAAACACTGTTGAGAGGACTCAGACCCAGAGAGGAAGGGACAGCAGAGTCACCAT
GTGGACAGGCGTTGGGGCTTGCTGGGCCGCTCACAGGAAGCAGCGCACACCAGAGCCATCCGCCTAGGAGCTGGGCCACAGTTTCCTGCAGAGTGGG
CCCTGACACACCCGGCCAAAGCAAGCACTGGCCTGTGGACAGAAAGCAGACACAGGACGGAGCCCGTTCCGGGGTCAGCTCACTGTACTTGAAGATG
TGAGCCCAAAGAAGTGGGGGGTGCCACGGCGTCTTTTGCAGATGTTAGTATGCCAGTTGGTGTTAGACACTTAGATATATTTTTAAGAAGAGCAGTC
GGTACTCTTAACTACTGAACCATCTCTCCAGCCCCACAATGACATTCTTCAAAGAGCAGAGGTTAGAGGCACAGGCACTTGTCACCAAGCAGCAACA
TGAGTCAGATCCGTGAAAATCCACAGGCAGAAGGAGAGAGCTGACTCCTGTCCGTTGACCTTCATGTGAATACAGTGGTGTGTGGTGGTGTGTGTGT
GTGTGTGTGTGTGTGTGTGTGTGTGTGTGCATTTATGCCATGTGTGTCAAGAGTGTGAGGAGGACCCAAGAGAGTTCCTAGACTTAAAGCTGGTTNN
NNNNNNNNNNNNNNNNNNNNNNNNNNNNNNNNNNNNNNNNNNNNNNNNNNNNNNNNNNNNNNNNNNNNNNNNNNNNNNNNNNNNNNNNNNNNNNNNN
NNNNNNNNNNNNNNNNNNNNNNNNNNNNNNNNNNNNNNNNNNNNNNNNNNNNNNNNNNNNNNNNNNNNNNNNNNNNNNNNNNNNNNNNNNNNNNNNN
NNNNNNNNNNNNNNNNNNNNNNNNNNNNNNNNNNNNNNNNNNNNNNNNNNNNNNNNNNNNNNNNNNNNNNNNNNNNNNNNNNNNNNNNNNNNNNNNN
NNNNNNNNNNNNNNNNNNNNNNNNNNNNNNNNNNNNNNNNNNNNNNNNNNNNNNNNNNNNNNNNNNNNNNNNNNNNNN
MOUSE SEQUENCE - mRNA
GAGCTAAGCCGTGTTGAACAAAGGAGGTCGGGCACAGCTATCCAAGCTCCCGGGGCCACCGGGCCGCCCTCCGCCACCATGACCGCCAACGGCACGG
CAGAGGCTGTGCAGATTCAGTTCGGGCTCATCAGCTGCGGCAACAAGTACCTGACAGCCGAGGCGTTCGGGTTCAAGGTGAACGCATCCGCTAGTAG
CTTGAAAAAGAAGCAGATCTGGACGCTGGAGCAACCTCCCGATGAGGCGGGCAGCGCGGCCGTGTGTCTGCGCACGCACCTGGGTCGCTACCTGGCC
GCCGACAAGGACGGCAACGTGACCTGCGAGCGCGAGGTGCCCGACGGCGACTGCCGCTTTCTCGTCGTGGCGCACGACGACGGCCGCTGGTCGCTGC
AGTCCGAGGCTCACCGGCGCTACTTTGGCGGCACCGAGGACCGCCTGTCCTGCTTCGCGCAGAGCGTGTCGCCGGCCGAGAAGTGGAGCGTGCACAT
CGCCATGCACCCGCAGGTTAACATCTACAGCGTTACCCGCAAGCGCTACGCGCATCTGAGCGCGCGGCCGGCCGACGAGATCGCGGTAGACCGCGAC
GTGCCTTGGGGCGTCGACTCGGTCATCACCTTGGCCTTCCAGGACCAACGCTACAGTGTGCAGACGTCCGACCACCGCTTCCTGCGCCACGACGGGC
GCCTTGTGGCACGGCCGGAGCCCGCCACGGGCTTCACGCTGGAGTTCCGCTCCGGCAAGGTGGCCTTTCGCGACTGCGAAGGTCGCTACCTGGCTCC
GTCCGGGCCCAGCGGCACCCTCAAGGCTGGCAAGGCCACCAAGGTGGGCAAAGATGAGCTCTTCGCCCTGGAACAGAGCTGCGCTGAGGTGGTGCTG
CAGGCGGCCAACGAGGGGAACGTGTCCACGCGCCAGGGAATGGACCTGTCAGCCAATCAGGATGAAGAGACCGATCAGGAGACCTTCCAGCTGGAGA
TCGACCGCGACACAAGAAAGTGTGCCTTTCGCACCCACACGGGCAAGTACTGGACACTGACGGCGACCGGAGGTGTGCAATCCACTGCGTCCACCAA
GAACGCCAGCTGCTACTTTGACATCGAGTGGTGTGACCGCCGGATCACTCTGAGAGCCTCCAACGGCAAGTTTGTGACCGCCAAGAAAAATGGCCAC
GTGGCCGCCTCGGTGGAGACAGCAGGGGACTCGGAACTCTTCCTCATGAAGCTGATTAACCGCCCCATCATTGCGTTCCGGGGGGAACACGGGTTCA
TTGCGTGCCGCAAGGTCACGGGCACTCTGGATGCCAACCGTTCCAGTTACGATGTCTTCCAGTTGGAATTCAATGACGGCGCCTACAACATCAAAGA
CTCCACGGGCAAGTACTGGACGGTGGGTAGTGATTCCTCGGTCACCAGCAGCAGCGACACCCCTGTGGATTTCTTCCTTGAGTTCTGTGACTACAAT
AAGGTGGCTCTCAAGGTGGGCGGCCGCTACCTGAAGGGGGACCACGCTGGGGTCCTGAAGGCCTGCGCGGAGACTATCGACCCCGCCTCACTCTGGG
AGTACTAGGGCCACCTGCCTCTGCAGCCGCTCTCGTCAGTCCTCCTGTTATCCTTACTCATCGGGTGGCCTGCAGCAGGTGGCAAACCCCTTGCCTT
TCAAACTGGAAACCCAAGAGAAAACGGTGCCCTTGCTGTCACCCTCTGTGGACCCCTTTTCCCTAACTCACTGCTCCCCATGGGTCGGTGGCTGCAG
ACTGTCCCCAGGAGGACTCTGGTTCCCTCTGTCCCCTTCTTTCCATGGGGAACTCTGGCACCTTTCTTCTGACCTCAGTCAACTCTGAGCCTTATTT
CCCCCCAGGAAGTGGCCTAGGAGAAGCTACAGGGCCTAGGGACTTACCCTGAGCTTGTAACTGGAAGACCCCGTCCCTATCCCCGCTCCCGCCCCCA
CCCCACCCCACCCCTGCTCTGGCCCCAGCCTCTGGAGGCCAGCCTTTTGGCGGGACTGAAGCCGGGCATGGCCAACCTTGCCCACAAGTGTTTTTCT
GGATCTTGGCTGGAAGGCAGTCTGTCCCATCCTGCAGTGTTTGGGCCTGGCTCTTTGACTCAAAGCTAGCTAGGTGGCACTCCGTGTCGCTCCTGCA
CATTCTGGAAGGGGCGGGCCTCCACCCACCTCATTCCTTTTCCCCCTGGCCTGACTGGAAGCAGAAAAATGACCAAATCAGTATTTTTTTTTTTTTC
TTTAAGGAAATGTTACTGTTGAAAGGCCCTAGGCAAGCCTGCCCTGTTGGTTGTAGTCGTGAGTGGTCTTGGGGGGAGATGCTTGGCTCCTGTCCCT
GCCTCCCCAGCGGTTCCCTCCCTCCCTCCTGCCTGACCACCCCAGCTCTGGCTCTGTGATTGGTGCTCCACGTCTCCAGACACCTCGGGGCTCCTGG
GCGGAGAAAGCCGATGTGCCCCTCCCTGGGAGCCCTGAGTAAACCTCAGGGGGCCCTTTCCCAATCACCCCTCCACCGACCCCTCAACACCATGCAT
CTCACTCTGGGTGTACTCGCTCACATTTATTTTTTTGTAACTGTCATTTCTATAACTCTGAAGACCCATGATAGTAAGCTTTGAACTGGAAAATAAA
GTAAAATCAAGTCTG
MOUSE SEQUENCE - CODING
ATGACCGCCAACGGCACGGCAGAGGCTGTGCAGATTCAGTTCGGGCTCATCAGCTGCGGCAACAAGTACCTGACAGCCGAGGCGTTCGGGTTCAAGG
TGAACGCATCCGCTAGTAGCTTGAAAAAGAAGCAGATCTGGACGCTGGAGCAACCTCCCGATGAGGCGGGCAGCGCGGCCGTGTGTCTGCGCACGCA
CCTGGGTCGCTACCTGGCCGCCGACAAGGACGGCAACGTGACCTGCGAGCGCGAGGTGCCCGACGGCGACTGCCGCTTTCTCGTCGTGGCGCACGAC
GACGGCCGCTGGTCGCTGCAGTCCGAGGCTCACCGGCGCTACTTTGGCGGCACCGAGGACCGCCTGTCCTGGTTCGCGCAGAGCGTGTCGCCGGCCG
AGAAGTGGAGCGTGCACATCGCCATGCACCCGCAGGTTAACATCTACAGCGTTACCCGCAAGCGCTACGCGCATCTGAGCGCGCGGCCGGCCGACGA
GATCGCGGTAGACCGCGACGTGCCTTGGGGCGTCGACTCGCTCATCACCTTGGCCTTCCAGGACCAACGCTACAGTGTGCAGACGTCCGACCACCGC
TTCCTGCGCCACGACGGGCGCCTTGTGGCACGGCCGGAGCCCGCCACGGGCTTCACGCTGGAGTTCCGCTCCGGCAAGGTGGCCTTTCGCGACTGCG
AAGGTCGCTACCTGGCTCCGTCCGGGCCCAGCGGCACCCTCAAGGCTGGCAAGGCCACCAAGGTGGGCAAAGATGAGCTCTTCGCCCTGGAACAGAG
CTGCGCTGAGGTGGTGCTGCAGGCGGCCAACGAGGGGAACGTGTCCACGCGCCAGGGAATGGACCTGTCAGCCAATCAGGATGAAGAGACCGATCAG
GAGACCTTCCAGCTGGAGATCGACCGCGACACAAGAAAGTGTGCCTTTCGCACCCACACGGGCAAGTACTGGACACTGACGGCGACCGGAGGTGTGC
AATCCACTGCGTCCACCAAGAACGCCAGCTGCTACTTTGACATCGAGTGGTGTGACCGCCGGATCACTCTGAGAGCCTCCAACGGCAAGTTTGTGAC
CGCCAAGAAAAATGGCCACGTGGCCGCCTCGGTGGAGACAGCAGGGGACTCGGAACTCTTCCTCATGAAGCTGATTAACCGCCCCATCATTGCGTTC
CGGGGGGAACACGGGTTCATTGCGTGCCGCAAGGTCACGGGCACTCTGGATGCCAACCGTTCCAGTTACGATGTCTTCCAGTTGGAATTCAATGACG
GCGCCTACAACATCAAAGACTCCACGGGCAAGTACTGGACGGTGGGTAGTGATTCCTCGGTCACCAGCAGCAGCGACACCCCTGTGGATTTCTTCCT
TGAGTTCTGTGACTACAATAAGGTGGCTCTCAAGGTGGGCGGCCGCTACCTGAAGGGGGACCACGCTGGGGTCCTGAAGGCCTGCGCGGAGACTATC
GACCCCGCCTCACTCTGGGAGTACTAG
HUMAN SEQUENCE - GENOMIC
TTGCATTTGAAGCTACCATGACTGCAAGAGGGAGTTCCCGAAGGGGTCTGGGAATGGCCCAGGGAAATAGGGGTGAGGTGAGACTCCACTGCCCCGA
CAGTGCCCATGTATGAATTAGAAAAAGTGGGCCAGGCGTGGTGGCTCACACCTGTAATCCCAGCATTTTGGGAGGCTGAGTGGGCAGATCATGAGGT
CAGGAGTTCGAAACCAGCCTGGCCAACATGGTGAAACCCCATCTCTACTAAAAATACAAAAATTAGCTGGGCTTGGTGGCACACATCTGTAGTCCCA
GCTACTCAGGAGGCTGAGGCAGAAGAATCGCTTGAACCTGGGAGGTGGAGGTTGCAGTGAGCCGAGGTCATGCCACTGCACTCCAGCCTGGGTGACA
GAGTGAGACTTTGTCTCAAAAAAAAAAAAAAAAAAAAAAAGAAAAGAAAGAAAGAAAAAGAAAAAAAGTGGGCCAGGTGTGGTGGCTCATACCTGTA
ATCCCAGCACTTTGGGAGGCTGAGGTGGGAGGATTGCTTACAGCCAGGAGTTTGAGACCAGGTTGGACAACATGGTGAGACCTTGTCTTTACAAAAA
AATACAAAAACCTATCTGGGCATGGTGTTGCATTCCTTTAGTCCCAGCTACTTAGGAGGTTGAGGTGGAAGGATCACTTGAGTTAAGGGAGGAGACC
ACCCCTCATATTGTCTTATGCCCAATTTCTGCCTCCAAAGAAAGAAAAAGTAAAAACTAAAAGGCAGAAATGAAAACCACAGGCAGACAGCCCAGCG
CCACACCCTGGGCCTCGTAGTTAAAGATCGACCCCTGATCTAATCGGTGATGTTATCTATAGACTACAGACATTGTATAGAAATGCACTGTGAAAAT
CCCTATCTGGTTTTGTTCTGATCTAATTACCGGTGCATGCAGCCCCCAGTCACGTACCCCCTGCTTGCTCAATCACGACCCTCTCACGTGCACCCCC
TTAGAGTTGTGAGCCCTTAAAAGGGACAGGAATTGCTCACTCGGGGAGCTTGGCTCTTGAGACAGGAGTCTTGCTGATGCCCCTGGCCAAATAAACC
CCTTCCTTCTTTAACTCGGTGTCTGAGTTTTGTCTGCGGCTCATCCTGCTACAGAGTCTAGGAGGCAGAGGTTGCAGTAAGCCAAATTCACGCCACT
GCACTCCAGCCTGGGTGACAGAGCAAGACCCCACCAAAAAAAGAAAAGAGGCCAGGCGCAGTGGCTCACGCCCAGCTAATTTTTGTACTTTTAGTAG
AGACGGGGTTTCACCATGTTGGCCAGGCTGATGTCAAACTCCTGTCCTCAGGTGATCCGCCCACCTTGGCCTCCCAAAGTGCTGCGATAACAGGAGT
GGAGGCTCAACTTTTTAAAGAAGAAAAGGACGAATCAGGACAGGAGACAATTACAAGCTCTGTTCATTCGGAATTCTCATTGGCTTACAGAAATAAC
TTTGGCTAGTGATTGGTTATATGTTGTAGACAGACCCACAGGGTGGATGGCGTCTGTGGCCACTTGGGCATTAGCTGGTCCAGAGCCCAGAGTCCAT
GTAGCAAGTAGCTTCAGGACGTAATTATTTAGCTCAATAGAAAGTGAGATGTGACTGCTGTTACTTTTTTTTTTTTTTGAGACGGAGTTTCACTCTT
GTTGCCCAAGCTGGAGTGCAATGGCGCGATCTCGGCTCACTGCAACCTCTGTCTCCCAGGTTCAAGTGATTCTCCTGCCTCAGCCTCCCGAGTAGCT
GGGATTACAGGCGTGTGCCACCAAGCCCGGCTAATTTTTGTATTTTTAGTAGAGACAGGGTTTCACTATGTTAGCCAGGATGGTCTCGAACTCCTGA
CCTTGTCATCCACCGGCCTCGGCCTCTCAAGGTGCTAGGATTACAGGCATGAGCCACCACGCCCGGCCTTTTAAGTGCTGTTACTTTTTTTTTTTTA
ATCATTTTTATTCTGCTAGTTCCATAAAAGCAATGTAAACACCAGCATTCTATACATCTTGCTGGTGAACTCACATAATGCTTAGTTCCCTGATCCT
TTGACCTCCTTGTCTTCTCCAGTTATTTTCTGTTTGGACCACTGGCCACAGGAATGGAGTGGGGTTGGGGCTTAGGAGAGAGCAATGTGGCTTTTTG
GTATGACTTGTTTCATTGACTGCTGTTACATTTTAAATGCCTTTCTGGGCCTGATAATTTAAGGGGGCTGGCATTTCTCACATCAAAGGGCAAAGGG
TTTTTTTGTTTGTTTCTCACTATTGCTCAAAAGCCACATGTGTCAAGGACAGCTCTTGTTAACGGGCAGAGAAGCTTATAGAACCTTTCCAGGGCTG
GCGCGGTTGTTCATGTCTGGGGGACAAGAGCGAAACTCCATCTCAAAAAGAAAAAAAAAAAAAAGAACATTTCCAGGCCAGGCACAGTGGGTCACAC
CTGTAAGTCCCAGCACTTTGGGAGATTGAGGTGGGAGGATCACTTGAGGCCAGGAGTTTGAGACCAGCATAGGCCACATGGCAAGAACCCAGTTTCT
ACAAAAACATTTTTTTTTTAAATTAGCTGGGCTCGGTGGTGCACACTTGTGGTCCCAGCTACTCGGGAGGCTGAGGTGGGAGAATCGCTTGAGCCTG
GGAGGCGGAGGTTGCAGTGAGCTGTGATCGCACCACTGCATTTCAGCCTGGGCAACAGAGGGAGACTCTGTCTCAAAAAAAATCAAATAAAGAAAAA
AGAACATTTCCATTATTGCAGAATGTTCTATTGGACGGCGCTGGGCCAGATGCCTGCCCCAAGCCCTGGGACACCCAAACCTGGTGAAAGTGCCAAG
CTCCCATCTGGGGGTGCTCACGGAAGGGGCCGGGAGCTGGGATTACAAGCGTGGAGGCAGGCGCCACCCCAGAGGAGGTGGGTGATGTCTGAGCCAG
AGTCTTTGGGATGAGCAGGGCTTTGGCAGGCAGCTTTGTTGGGCAGGCAACAGGCACAGCAGGTGCAATGGCATCGAGGTTGGAGAGGTGGACTGGC
GGGGAGAAGAGAAGGGAGGGTGGCAGGAGAGATGGGCAGAGGCCCCCCAGGAGCCCAGAGCCTTCAGGGCTTTGGGCCCTCTTGGGGCACTGGGGAG
CCACGGGAGAAGTGTGGGGTGGAGAGGGGCGCCCTGGATTTGACCACCTTCAGGAACCTACCTTGGCTGCCCGGGTGGGTGGGATGGAGGTGATGAA
GGTGGAGGTCGTAGCATTGTCACTGAGAGCGATGCTTATTCTGATTTTTGCCCCCGTGAGCCTCAGAAATCGGTCAGAACAGTGCTCGGGCTGGGCG
TGGTGGCTCACGCCTGGAATCCCAGCACTTTGGGAGGCCGAGGCGGGCGGATCACGTGAGGTCAGGAGTTTGAGACCAGCCTGGCCAACATGGCAAA
ACCCCGTCTCTACTAAAAACACAAAAATTAGCTGGGTGTAGTGGTGCATGCCTGTAATCCAGCTACTCCAGAGGCTGAGGCCTCCCTGGGAGGCGGA
GTGCAGTGAGCCAAGATTGTACCACCGCCCCTCCAGCCTGGGTAACAGAGTGAGACTCTGTCTCAAAACAAACAAAAAAGAACAAACCAAAACCAGT
GCTCCAATTCACCTTGCTGAATTGGAGAAGAACAGGTGCCTGGGTCCTCCCGGCTGACGGTGACGTCACTATGAGCCACCACGCCTGGCCCGGTGGG
TGTTTACAGCAGAGGTGGTTCAGGGAGGAGTGAGTGGCAGATGGTGCAGGCTCAGGGAGGAGTGAGTGGCAGGTGGGGCCTGAGGCCAGAGGCAGGA
GGACCGTTCAAGACTGAGGTGTCTTGGGCACTGGTGCCGGGGCCGGGGAGAGCCCTGGCATGCCGGGCCCCGGCCCTCAGTGAAAGCAGGATGAGGT
GGCGGCCAAGCAGGGAGGCCAAGGCCTGGCAGCAGCCGGCAGCCCCTCTCCTGGCAGGGACATCTTGGCAGGAGCCGGGCTCTGCCCAGGGCGCTAA
TGTCCTGTTAATTAGCCAGGCACTTGCCAAGCACTTGCCGCTGCGGCCTCACTTTGCAGAACGCACTTGGGTTTGGAGCAGGACCAGCATCGGCCAC
CGGGTGAGTAGGGGGGATGGCCAGGTGAGTACCATGGCCAGAAGGTGCGGCCTCTGAGTCCCCACTGAAGCCAATCCAGGCCCCGACCTCTGGTCAT
CATCAACAGAAGAGTGACAGAAACAGAAAAGATATCAAGGAACACGTTTTCAGGGCCAGATTCCAGGTCCCCCACCTATTTTCCTTTGCTCGTGCCT
TGCCTGGCTCTGCCCCCTTGAACTCTTATTCACCCAGTGTAGGCATCACCTCCTCCTGAAGGCCCTCCTGGACTGCACAGTTAACTCTGGAGCCTCC
CCTGCACAGGGCAGCTCATGTATGGATCCACAGGTGAGTTCCTGTCTTTGAAGGGTTACAGTTTAGGTCCTGGAGCAGTGGTGGGGAGGTCACACCT
CCACCCACATCCCTCTTTGCAAATCCCATGGGAACTATGAGCCTGGGTCCCCCAAACTGCATGTTCCCCACTTAAAGCTGGGCCAGATCCTGTTTGC
TGTATCCAGGCCTCAGTTTCCCTGCTTGTAACCAGAAGTCCATGCAGCCAGAAATTGTCAGGGAGCTGGGCACGGTGGCTCATGCCTGTAATCCCAG
CACTTTCAGAGGCTGAGGCAGGAGGTTCACTTGTGATCAGGAGTTTGGGACCCCAGCCTGGGCAATACAATGAGATCCCTGCCTCTACCAAAAAATT
AAAAACAATTAGCCAGGCCTGGAGGCATACACTTGTAGTCCTAGCTATTCAAGGGAGGCTGAGGTGGGAGGATCACTTGAGTCCAGGAGTTTGTGGC
TGGGGTGAGCTCTGATTGTACCACTGCACTCCAGCCTGGGTAAGAGAATGAGACCTTGTTTTATTTTATTTTATTTTTATTTATTTTGAGATGGAGT
CTCACTCTGTCACCCAGGCTGGAGTGCAGTGGTGCAATGTCGGTTCACTGCAACCTCTGCTTCCCGGCTTCAAGAGATTCTCCCGCCTCAGCCTCCC
AAGTAGCTGGGATTACAGGCGTGTGCCACCACGCCTGGCTAATTTTTTGTGTTTTTAGTAGAGACAGGGTTTCACCATGTTTGCCAGGCTGGACTTG
AACTCCTGACCTTAGGTGATCCATGCCCCCTTGGCCTCCTAAATTGCTGGGATTATAGGCATGAGCCACCGGGCCTGGCCGAGACCCTGTTTTAAAA
AAATTAATCAGGTCCAGTGCGGTGGCTCACGCCTGTAATCCCAGCACTTTGGGAGGCCGAGGAGGGCAGATCACCTGAGATCGGGAGTTCGAGACCA
GCCTGACCAACATGCAGAAACCCCGTCTCTACTAAAAATACAAAATTAGCAGGGCGTGGTGGCGCACACCTGTAATCCCAGCTACTTGGGAGGCTGA
GGCAGGAGAATCACTTGGACCTGGGAAGCAGAGCTTGTGGTGAGCCGAGATTGCACCATTCCACTCCAGCCTGGGCAAAAAGAGTGAAACTCCATCT
CAAATAATAATAATAATAATAATAATAATAATAATAATAATAATTGGTAGAGATGTTGGTAGAGGCAGGACAGTGGGAGTGACAGCCTGGTCCTGTC
CTCCCGGGCTCTGGCTGACCATGCTGTAGTGTGGCTCAGGGCCCTGGAGGGCACAGCTGTCCTGTGGCCCTGTGGTCAGCCGGGAAGCCAGGCCTGG
CAGGACTCCTGCCCTAGAATCAGCTCCTCCCACTCCCCAGGGTCCCATGCAGGGCGCTGGCCGTACCAGGCCTCCTCGCGGGTGCCACAGAGCCAGC
GGCTGCACAGCAACAGAGACGCCATTCACAGGCTCTCGGCCACGAGGCCGCTCATTTACAGAGGGCTGAGCCGCTGACATCTGTGCGTTTGTAACAT
GGACAGCATTTCTGGTCCCATACAGACGCGTGGGCCAGCCACATTTATCTCCCCTTGAGAGAAGGGAAACGAGGCTCGGGAGGGAATGAGGGATTGG
CTTGGGGTCACACAACTTTAATGATGACCCTGGGCAGGAAGCTCCCAGGATGGCAACAGAGACTCAGGGCAGGCTGGGCATGGTGGCTCACACTTGT
CATCCCAGCCCTTTGGGAGGCAGAGGTGCAAGGATCACTCGAGCCCAGGAGCTCAAGGCCAGCCTGGGGAATATAGTGAGAACCCATCTCTAAAAAA
AAAAAAAATAGGCCGGTCGCGGTGACTCACGCCTGTAATCCCAGCACTTTGGGAGGCTGAGGCGGGTGGATCACGAGGTCAGGAGATTGAGACCATC
CTGGCTAACACGGTGAAACCCCGTCTCTAGTAAAAATACAAAAAATAGGCCGGGCGTGGTGGCTCATGCCTGTAATCCCAGCACTTTGGGAGGCTGA
GGCCGGCGGATCACGAGGTCAGGAGTTCGAGATCAGCCTGACAAACATGACGAAACCCTGTCTCTACTAAAAATACAAAAATTAGCCGGGCGTGGTG
ACACGCGCCTGTAGTCCCAGCTACTCAGGAGGCTGAGGCAGGAGAATCGCTTGAACCATCGAGGTGGAGGTTGCGGTGAGCCGAGATCGCACTACTG
CACTCCAGTCTGGGAGACAGAGTGAGACTCCGTCTCAAAAAAAAAAAAAAAAATTAGCCGGGCGTGGTGGCGGGCGCCTGTAGTCCCAGCTACTCGG
GAGGCTGAGGTAGGAGAATGGCGTGAACCCGGGAGGCGGAGCTTGCAGTGAGCCGAGATCGCGCCACTGCACTAAAGCCTGGGCAACAGAGCGAGAC
TCTATCTCAAAAAAAAAAAAAAAAATTTAGCCGGGCATGGTGGTGCATGTCTGTACCCCCAGCAATTTGGGAAGCTGAGGTGGGAGGATTGCTTAAG
CCCAGGAGTTTGAGGCGGGAGTGAGCTGTGATGGCACCACTGCACTCCAGCCTGGGTGACAGAGTGAGACCCCGTCTCTCCCTATCCCCCGCAAAAA
AAAAAAAACAACTCAGGGCTTTCCCACCCCTGTCCTTGCACAGATGAAGAACCGAAGCTTCTAGAAGGGGTATATTTTGCCCCCAGGCCCCAAATCC
TGGTCTTTGGACTACAGTCAAGACCTAGCACAGGGCTCAGGCCTAAAAAAAAGCTGTTGAGGAGGGTGTGAGGCTGCAACGTTGCGGTGAGAAGGGG
GTCCCCAGGGAGGGCGCAGCAGGAAGCCCCAGGGAAGTGCCTGGGAGAGGGAGGTTGTGCAGCCAGAAGGAGCAGCCCGCAGCCTTTGGTTGTTGAC
TCCTGCTTTGTAAGTGGCAGTCTGGTTGGGTAGGACAGGGTCCGAGTCCTCACTCAGGGAACTGAGTCCAGGGTGAGCTGAGCAGCCCTTCCTGGTG
GCCTCACTTTCCCCTGCAGAGCCTGCTGCATGGTGTCCAGTGGCCAGCCTGGGAGGAGCTCAGGACTGGCCTCACCTCGTGCCACGCCCTCGTACCA
AGGTGGCTCAGATGGCACCTGGGTTCCCGAAGGGCCCAGGAACACAGCGTCCATGTCCCCATCCTTCCCCGGAGGGACTTGGGGTGGGGCCTGCAGG
AAGGATCATGTGACTTGTTCAAGGGCAGCTTGTCCTGCCCCGGACACAGAGGTGCCCATCGTAAGCGAGATGCAGGCAAGGTGAGGACAGGGCATGG
TGCCGAGCAGGAATGATTTTCGAAAATGCTACTCTGTGGTCGGGCACGGTGGCTCACTCCTGTAATCCCAGTACTTTGGGAGGCCCAGGCGGGCAGA
TCATGAGGTCAGGAGTTCAAGACCAGCCTGGCCAACATGGTGAAACCCCTTCTCTACTGAAAATACAAAAAACTACCCGGGCGTGGTGGTGGATGCC
TGTAATCCCAGCTACTCAGGAGGCTGAGGCAGGAGAATCGCTTGAACCCTGGAGGTGAAGGTTGCAATGAGCCGAGATTGCACCACTGCACTCCGAC
CTGGGCGACAGAGAAAGACTCCGTCTGAAAAACAAACAAACAAAACCCCGAGATTCTCTTTTCCCCCGTCCGGAGCTCTATGGCCATCTGGAGCTCG
TTCTGTCCACAAGGACACATTTCCTGGCAGCAGCTGTGGACCAGGGCTCACTCACTCACATCTGTACCCAATCTAGAGCAGGACAAACACCTATCAC
CTGCACTGGCAATGGACAGAGGACAGTGGCAGCCCCATCACCAGAGGCATTCAAGCCAAGGCATTTTCTATCGTCTATTTATCTATCTATCTATCTA
TCTATCTATCTATCTATCTATCTATCTAGATGAGATCTTGCTATGTTGCCCAGGTTGAACTCCTGGCCTCAAGCGATCCTCCTGCTTCAGCCTCCCA
AAGTGTTGGGATTTCAGGTGTGAACCACTGTACCTGGCTGGAGTGCAGTGGCACTGTCATAGCTCACTGCAGCCTCCACCTCCTGGGCTCAAGGAAT
CCTCTTTCCTCAGCCTCCTGAGTAGCTGGGACCACAGGCATGCACCATCACACCCAGCTAAACCTTGATTTTTTCCATAGTATATGGCTCAGGGCAG
AGCAAAGAAGCACAAAAACATGTTGGCTTGCGGTTGAGGGCTGATGGGAGGGGGTTCTGGCCAAAGCCCAAAATTAACAGCCACAACGTCAGTGTCT
GTGGGAGGGGTTGCCAGGGGCGTGCGGGTTCTGGGGCTCAAGGCCCTGCCGGTAAACCCATTTGAAGCAGGATGGCAAGAAGGTGACACCATCTTCC
CCCGCGCACTGAAAGCCCCTGGCTGGGATTGCCTGGGGCAGACACAGGCTCGGACCAGCCCCAGCAATCCCAGTTTATCAGCGAGCCGGCTGAGGGC
CCGGAGTTATCTCAGTGCCCGGCCTGAGACCTTGTGGGCAGCCTGTGGTCATGCTGGCATTCCAGGGGCCTTTTGGCATGTGGGGAATGTCCAGGAA
AAGCCTCAGCCTTCGGTGAGGCGCAGAAAAGGGAAGTGTCCCTAGAGGGGGTGGGTGAGGGCGTGGGAGGTGGTGTCTGCAGGGAATGTCCCCTTTG
GGGGAGGAGGATGGAGGGTTGGGATTCTGAGGATGGGGGGGGGGGCTGTAGCCAGCACCATGTCCCTCCTGTGTGACCAGCTCAGAGTCCCATGAAA
TTGGGGCTTGGGAGGGGAAGGGACACTGGCCTGGGAACCAGAGACCTGGGCTGGTCTGGCTCACAGTTGCTGGACCTCTGTGATCCGTGTCAAAAAA
CGAGAACACCAATTCCTGTCCTGCCCACTCACCACCAGGTGGGACCTGAACCCTGGCATCGCCAGCATTGGGAATGTCGGCCACTGACTCAACCACT
CTCCCGGAGACCTATTTGGGCCACCCGAGGCGGGTGCCTGGGCCACACGGAGGGGTCCTGGTGGTCTTCAGGGCAGCGGCTGTGGGGCTGAAGCCTC
AAGGAACCACATCTCTGCATAGGAGGGCCAGGCTGCAGGGCCTCGGAGACAACCTAGTTGGGCGTGTTGGGGTCTGTGGGTCCCAGGTCCTGGCCTC
ACCGGGTCCCCACCGCGCTGTCAGCTCCCAGCCTCTTTCCCTCGTCTGCCTCTGGGCTTCTGTAAGGCTATGTGCTCCAAGGCCACCTCCTCCAGGC
AGCCCTCAGACCCCCACCTTCGCCCAGTACCGATCTGCACCGTGGTCTCTGAAGTCTCCATCGTGACCTCAAACCTCGCTCGTCCTTGCTCCTAGCG
AGGCTTGGGGTCGGGGTGTCCGAGGTGGGGGACATCCGGGGGGGTTAGGTGGCTGGCGCGGGGAGCCGGGGTTGTGAGGGGTGATGTCCTCAGGCGG
CGGCGCTGCGGGGTGCGGCGAGGACACCGGTGGGGTGAGAGCACCGGCGGGGCAGCACCGGGGGCCGCAGCGCCGGGTCCCTCGGCCCGGGGCCCCT
CCCGCGCGGAGCCAGGGGCGGGACAGGGGGGCGTGGCCTGGTGGCGCTGACGTCACCTCGCCTATAAAATGTCCGGGGCGCCGCTAGCTGGGCTTTG
TGGAGCGCTGCGGAGGGTGCGTGCGGGCCGCGGCAGCCGAACAAAGGAGCAGGGGCGCCGCCGCAGGGACCCGCCACCCACCTCCCGGGGCCGCGCA
GCGGCCTCTCGTGTACTGCCACCATGACCGCCAACGGCACAGCCGAGGCGGTGCAGATCCAGTTCGGCCTCATCAACTGCGGCAACAAGTACCTGAC
GGCCGAGGCGTTCGGGTTCAAGGTGAACGCGTCCGCCAGCAGCCTGAAGAAGAAGCAGATCTGGACGCTGGAGCAGCCCCCTGACGAGGCGGGCAGC
GCGGCCGTGTGCCTGCGCAGCCACCTGGGCCGCTACCTGGCGGCGGACAAGGACGGCAACGTGACCTGCGAGCGCGAGGTGCCCGGTCCCGACTGCC
GTTTCCTCATCGTGGCGCACGACGACGGTCGCTGGTCGCTGCAGTCCGAGGCGCACCGGCGCTACTTCGGCGGCACCGAGGACCGCCTGTCCTGCTT
CGCGCAGACGGTGTCCCCCGCCGAGAAGTGGAGCGTGCACATCGCCATGCACCCTCAGGTCAACATCTACAGCGTCACCCGTAAGCGCTACGCGCAC
CTGAGCGCGCGGCCGGCCGACGAGATCGCCGTGGACCGCGACGTGCCCTGGGGCGTCGACTCGCTCATCACCCTCGCCTTCCAGGACCAGCGCTACA
GCGTGCAGACCGCCGACCACCGCTTCGTGCGCCACGACGGGCGCCTGGTGGCGCGCCCCGAGCCGGCCACTGGCTACACGCTGGAGTTCCGCTCCGG
CAAGGTGGCCTTCCGCGACTGCGAGGGCCGTTACCTGGCGCCGTCGGGGCCCAGCGGCACGCTCAAGGCGGGCAAGGCCACCAAGGTGGGCAAGGAC
GAGCTCTTTGCTCTGGAGCAGAGCTGCGCCCAGGTCGTGCTGCAGGCGGCCAACGAGAGGAACGTGTCCACGCGCCAGGGTGAGTGGGGACGCTGCC
CCCGCCTCTCCTGGTCCGTGCACAAAGCGCACCCCACCCGCGCCCCTCCAGCCTCCCGCCCTTTCTCGCTCGCGGCGCCGCTGCGGTCCGGAGCACT
GCCCATTGCGCCCCCGCTAGGCACGCGGGCTACCCCGCCTGGAGGGGGCGAGGAGTGGGGCTTTGCCCATCCTCGGGTGCCGCTGCCCACCTCCCAC
CCCGGGCTGGGATCATGGGCTCCCCTAGGCCCCGCGGAGTCGCAACCGTACGTGCACCCTCCTAACCCCCCCCCCCGCCCAATCTTGGCTCTCCCCA
CGCGCGCTGATCCCTCGGATCAGCTGTCCCAGCTCTTGCGGAGTGGGAGCCCCTCACCCATTTCCTCGTGCCCGTCCCCCCGCCGGCTGTCCTGGAG
CTCGGGGGTCCGAGGCAAGGGTCGCCACCCGCAAGGGCGCGCCTCCACCCCCACCGGCAGCCTTTCGCGGGCGAGATGGGGGAGGTTAGCCAGGCCT
TTGATCCCGGCGGGGCGCGCCTCCACCTCCCCGTCTGCCCGGCCTTCCTCCACCTCCTCCCGCTGCCGGGCGGGGTCGGCCTCCGCTGGTGGGGGGG
GGCGCGGGGTGTCAGCCCTTCCCCCCAGCCCCTCCTCCCGCGTCTGCCCCGCGCTCGAGGCCGCGGCCTTTGTGAGCAGGGGGGCGGGTCGCCTCGA
CTGGGTCCTCCCTCGCCCCCTTTGTCCTGCTCCATCTCTGCAGATGGGAAAACCAGATGCGGCGGGGCGGGGGAGGGGATCGGCTTTTGCGGTTCAC
CCCTGCAGAGGAGCCCCCCGCGCCGCCCCCGGGCCCAGGGCTCGGGTCCCGAGGTTCCCCAGGAGGCGGTCTCCCTCCTCGCGCCGCGGCCCGGGAA
CGGCGTGGCGCGGATGGCGGCCCTCCAGGCACCCCGCCCTTCGCCCGCCGCGCGCGTCTCCAGGCCGGTGCGCTGAGCTCCGCTCCGCGGGCGACCG
AGGGCGGCTTCAGCGCGAGCCGGGAGACCCCAGGCCAGCTCCCTCGGGAAGCCCCTACCCTCTGGTGAACCCATCCCCTAGGGCGCTCGCCGGGAAC
AATTGACTGCAACTCGATCCGTCCCCTCCGGGGCCTCCTGCAGGCACGGCTATTTGCGACCGGCCTGTGCGCCACTCTTTCCCTTCTTTCTCAGATT
CTCCCCGAGGGGCTTTCTCTTCCTTTTGGCGTCCTCTTCCACTCCTGGCGGAGAAGCTGTTCCTTGCTTGCAGACAGAGGCCCCGCTGGAGGGAGGG
GCGTGGGGGGATCTTTTTCCCTGGATAGGAAGTCGGACCCCAGGCCTTGGAGATGGCTGGACGGGAGCCCAGTTTGTGTCCTCATCCCTCCTCTTGG
AAGGAGCCCTCCTGACGGCCCCCCTCTTGGCTGTGGGCTCTGCAGGAGGGGGAAAGACCCCCCATGGCAGTGGGGGTGAGGGTGGAGGCCTGGGTGG
GGTAATGGCCATTTTGTGCCTGAAGTTTGCTACCTTAAGTCCCAGAGAGGTGAAGCTGCTTGTCATGGGTCACACAGCAAGTGACCACAAGGAAGCA
GCATGCAGAAGTGGGTGCATTTGGCTCCAGAAACCCCGTTTCCTGTTTCCCACAGCGCATGGCGGGCAGAGCTCCTCACCTGATCAGCAGGCATTGA
GCCCTACTAAGGGGACCTGCTGAGCCATGAGTGAACCAGTGGGGTTCACGTTCTCTTGGGGACATTACGAAGTGTCAAGGAAAAGGCAGCGGGTACA
GGTTATTAGATGGCTGAGTCCTTTCTGAGCAGGACATTTGAGCTGGCCTGAAGGATGAATAGAAGGTGGCAGGTATGGGGGGGGTGCTGTGTGGACC
AGCGTTGTAGGCTGTGGGTGTCTCCTGTGCAAAGGTCTTATGGCAGGAAGGTACAGAGAAAGCCCAGTGTGGCTGGGAGGAAGCTTGTGAGGTCTGG
GCCACGGGACCTTGGGTGAGAGCTTAGTGCAGGGCTATGGTCCTTGCCTTGGGGTTGCAGCCACAGCCTCCCGTGGGGAAGAAGTCGCAGAAGTAGG
TGGCCTTGGCCCTGGGGGCCAGGAAGTTGCAGAGAGCCTGAGGGTGTTTTTGGCGAGCCTGGGCAGATAACTCCCCTCTCCTGAGAAGCTTGCTGGG
GGCGTCTGGTGTGTGATTCAGGCTGATAGGGTGGGAGGAACCAGAAATTGCAGCCAGGAGAGGTGGTGGTGATGGCTCAGCTTGGAGTTGAAAGGGA
TGTGGGACGGCGCGGGGGTGGGGGTACTTGGGGGCCGAGGTTGGGGCTCCTCTGGCCTCAGATCTTGGGGTCCTTATCTCGTTTCTATGTCAGCCAA
CTCCCGGGGGGCTTTTGGGAACTGGAGTCTGCAGGGGTGGGCGTGGGGGGCGTGTCTGCAGAGGCCATTTTGGACGGGCCTGCGTGGCAAGGGGGAG
GCGTCTGCTTCCGACACACATGCTGGGGAACGCCAGCCAGGAAGGGGAGGATCCGGACTTAGCTGGCAGGGGGGATGTGAATCATCTCTGCAGGCCT
GCACGGGCGGGCCCGGTGGGGGCAGGGTGCTCCCCTTTGAAAAACGCTGCGCCCTGCTCTTCAGCCTCAGTTTCCCCATCTGTAAAGTGTGCATTCC
AGGCCTCCTTGGGCTGGCCCAGAGCTGCCCTGGGCAGGGGCTTTCAGCCCTTCACACCAGAGGCTGGGTCAGCTGAGTGAGTGCTCCTTTGTCCTCC
CGCCATGCCCCAGGCTCCTCCCTGCTCCCCAGGATCCACACCTACCCTGGCCCCGACCCTGGGCCATGCCTCACCACACTTCCTGTCTTCTCTCACA
TCTCTCACATCTGGGAGTCCTCTCCCGCCAGCCTGTGCTTGCATCTGGGGATCCATGCCAGGGATAGGACCTGTCCTCCCTGCTGGCTTGGGACATG
CCCTCTCCCAGCCACTCTGAGGAGGGCTGACTGAGGAAGGGCTCGTCAAGCTGGGCTTTGCAGGATGTGTAAGAGTTGTCCCCACGAGGCGCAGGGC
ATTCTGAGCCCAGGGAATGGCTTGTATAAGGATGCAGAGGCATTTGAAATGGCCAAGTAGTTGCAGGAATCGACTGGAAACCGGGGTGGTAAGGTGA
AGCCATAGAACATTCCAGGCCCCCTCCCCTAAATGAGATGGAAGGAGTGCCTGTTTTGAACAAGCCAGGGGCATCTGGGGACCGTTAAGGCCTGGGG
GTGGTGATGGGGACTGGAGGGTGTGAGGCAACCAGGGGGTGCCCCTCTGAGCCACCACAGACAGAATGGTTCAGAAGGCCAGGCACACTGGCTCTCG
CCTGTAATCCAAGCACTTTGGGAGGCCAAGGAGGGAAGATGGCTTCGGCCAAGGAGGGAAGATGGCTTCAGCCCAGGAGTTCAAGGCCAGCCTGGAA
AACATGGCAAAACCTCTGTCTACAAAAAATACAAAAAATTAGCCAGGCATGGTGATGCACGCCTGTCGTCCCAGCTACTCAGGAGGCTTAGATGGGA
GGATCACTTGAGCCGGGGAGTTTGAGGCTGCAGTGAGCCGAGATCGTGCCACTGCACTCCAGCGTGGGCAACAGAACGAGACCCTGTCTTAAAAAAA
TTTTTTTTGGCCTGGTGCGGTGGCTCACGCCTGTAATGCCAGCACTTTGGGAGTCCAAGGTGGGTGGATCACCTGGAGGTCGGGAGTTTGAGACCAG
TCTGACCAACATGGAGAAACCCCATCTCTACTAAAAACACAAAAATTAGCCGGGCGTGGTGGCGCATGCCTGTAATCCCAGCTACTCTGGAGGCTGA
GGCAGGAGAATCCCTTGAACCCGGGAGGCGGAAGTTGCAGTGAGCCGAGATCGCACCATTGCACTCCAGCCTGGGCAACAAGAGTGAAACTCCATCT
CAAAAAACAAAACAAAACAAAAAAAACAACCAAAACAAACAAACAAAAAACTGTAATTAAAATAATTAAAAGAAAAAAGTTAAAAAAAAAAAAAAGA
GAGGATGGCTCAAAGGCTGGAAACAGGGAAGGCCACTGTGAGGGGAGGACAGGCAGGGCTAGACCTCTCTGGAAGGAGGAGGGAGAGGTACCCGTGG
GCCCGGCACAGGAGACTCTTAATCTCCTGGCTCCCGGGGGCTTCTGTGGGCCTGTGACTCAGGATTTCTGTGCCTCTGTTGATGAAAAGAAAAATCC
TGAAGAAAACACTGTTCCCATAGTAACACAGCTCTAATTAGAGACTCCAAGGCCAAGCGAGGGCCTTGGAGCCAGGAGGGGCCCTGCTCTACTGGGG
GGACGACACCCCTTTCCCGTATCCCTCCCTGCTGGGGTGTGGCCTGATGTCTACGTGGCACCAGGCCCCTAAATCCTTTCAACATCCTGGCGGAGCG
GAGAGGCTGGGCCCTTTTGACAGGTGGGGAAACTGAGGAAGGTTGCAGGGAAGGCACTCATCCAAGGGTGCCTGGCCCCCCGCGGTGGGTGCCTCAC
TGGCTGGCCTAAACCTTTGCATCAAACCAGTTCCAGGATTGAACGCAACAGGCTGATGGGGACTGAGTCGTGGTACAGATGGCGGCAGTTGTGTGGC
CCTGGGCCCAGGAATGGCTGGGAAGCTCCCTTTCTTCTCTGGCTTGGGGGATGAGGTTAGTGTAAATTTCATGGAGTTGCCAGGAGGATTAAGGCCG
ACGTGCATTCACACGTGGCCCCGTGGCTGCCGCCAGTTAAGCCCTGCGCAGCCATTGGAAGTCTCATTGAGAAGGAGCCTCCCGGCTTCCTGCATTT
GTTCCAGGCGGGCTGGTAAGCGCCCTGCTTATTTGCAAGGCTGTGTGAGGACGAGCCCTGTAAACCCTAGGACGAGGCTGTGCTAATGTGGTTTCTG
TTCCACTGTCTCCCCTTCTCCTTTTGCCCCTCTTTCTGGGGAACCTGGAGCCCCTGATGCCCTCTGTTTTTTCCTGCTGCTGGGGTGGACCTAGAAC
CTCTCCCTCCATCCTTTCTGCTGCTGGGGTGGGCCTGCAGGAGGCTGTCCTCTTACCTGGTCCCTAACTTCCCTCCGATCAGCGGGGCTTCAGCGGA
GCCCCAGCGCATTGGACAGGTGGTGCTCTGTGGCCGGCACAGGCCAGGGCCCAGGGTGCGGCCCCTGCCTGTAGGTAGACATGCAGGCCCTTCTGAG
CAGAATGAGGGGGCGGTGAGGGCAGCTGTGCGGGTGTGGCTGGCCTGACGGCTCCCTGCAGCCCTGCGGCTTCTGTGCAGTGGGGGTGGGGCGGGCC
AGACCTTTGCAGGGCCTCTTGGCTGGTGGAGGGCTGAGTGAGCAGAGGCCCCAGCCCTCGTGTTCCCTGGGGTGTGGCCTTAGGATGGTCCCGGCAC
CCTGGGGACCCAGCCCCTGCTCACCTTATCCTCCTCCCGTGCTTGGCTGGGGTGTGGTGGCTGAGCCAGCCCACCCAGTGCGGTGGATGCTCGTCGG
AGGGCAGAGGGTGGGCTACCGGCTTAAGGGGCCCCAGGGAACCTGGGGGGTGGAGCCCAAGGGGTTCCAAGAAGGGGCGGGGCCAGGAACCCATAGA
CAAGAGGGTGGGGCAGGGAAAGGGCGTGGCAAGAGGGCCACCCACCTCCGGTCCAGAGAGCCAGCCAGACCCTTACTTTCTCTTGCTGTGTGACCTT
AGGCAAGGACATGCCACCACCGGCCTTAGTCTCCCTCTTTGTGAAGTAGGATGAAGATCCCCACCTGTGGAGCAGATGTGGGGCTGCATGGTTGGGT
CAGGATGGAACAGGATGGGGAGGCCGGGCGTGGTGGCTTACCCCTGTAATCCCAGCACTTTGGGAGGCAAAGGTGGGAGGACTGCTTGAGTCCTGGA
GTTTGGGCAACATAGCGAGACCACCCCCATCTCTACAAAATAATGTTAAAGTTAGCCAGGTGTAGTGGTGAGTGCCTGTGGTCCCACCTACTGGGGA
GACTGAGGCAAGAGGATCCTTTGAGCCCAGGAGGTGGAGGCTGTAGAGAGCCATGCTTGGGCCACTTGCACTCCAGCCTGGGCAACAGAGCAAGACC
CTATCTCTAAAAAAAAAATGGAATTGAGGATGTGTCCTCTGGGTGTGGGCTCTACCACCCACCAGCCTCCCTCTCCTGTGGGTGCTGCCTGCCACCC
ACCGCTGAGGTCCCTGCAGCATCAAGGTGCCCAAACGAAGACACTCTCCAGCTCTGAGCCAGGCACCCATACAGAGCCCGGCAGACGCCTCTGCTGC
TGCAGTTCTTAGAATCCAGAGCGCGTGGGGAATGTGAATTTGTGCTGCTGGAGCCAAACATCCCACCTCCAGGTTTTAGCTGGAGGAATCCATGTGG
ATATGCAAAGCAATGTAGTTATAATGAATAGCAATTGTGGGCTGGGCGCAGTGGCTCATACCTGTAATCCCAGCACTTTGGGAGGCTGAGGTGGGTG
GATCACCTGAGGTCAGGAGTTTGAGACCGGCCTGGCCAACATAATGAAACTCCGTCTGTACTAAAAATACAAAAAAATTAGCCGGGCATAGTGGCGG
GTGCCTGTAATCCCAGCTACTCAGGAGGCTGAGGCAGGAGAATCACTTGAACCCAGGAGGCAGAGGTTTCAGTGAGGCGAGATCGTGCCATTGCACT
CCAGCCCGGGAGACACAGCGAGACTCTCTTTCTCAAAAAAAGAATAGCAGCTTTGCTATAGCTTAGGGGAGCAAAACCCGAAAGCCACCTTAAGTTT
CCCGAAGATAGAGATCCCTGGGGTCCTATTCTGAGACAGAGTCTTGCTCTGTCGCCCAGGCTGGAGTGCAGTGGCGGATCTCAGCTCACTGCAGCCT
CCGCCTCCTGGGTTCAAGCAATTCTCCTGCGTCAGCCTCCCGAGCAGCTGGGATTACAGGCGCCCGGCACCACCCCCAGCTAATTTTTTTTTTTTTG
AGACAGAGTCTCGCATTGTCGCCCAGGCTGGAGTGCAGTGGCGCGATCTTGGCTCACTGCAAGCTCCACCTCCCGGGTTCACGCCATTCTCCTGCCT
CAGCCTCCCGAGTAGCAGGGACTACAGGCGCCCGCCACCGTGCCCGGCTAATTTTTTTTTTTTGTATTATTAATAGAGACGGGTTTCACCGTGTTAG
GATGATCTCGATCTCCTGACCTCGTGATCCGCCTGCCTCGGCCTCCCAAAGTGCTGGGATTACAGGCATGAGCCACCTTGCCTGGTCCTTTTTTTTG
TATTTTTAGTAGAGATGAGGTTTCACCATGTTGGCCAGGCTGGTCTCAAACTCCTGACCTCATGATCCGCCCGCCTCGGCCTCCCAAAGTGCTGGGA
TTACAGGTGTGGGCCACTGTGCCCGGCCAGTCCCATTCTACTTTTTAGGGACATGGAATCATGTAAAGATGCCATACAGAAAACAGTATGCAAATCC
AGAGACAGAGACATCTGTCATGTTTCTTCTTTCTCCTTTTTTTTTTTTTTTTTTTTTTTTTTTGAGATGGATTCTTGGTCTGTCGCCCAGGCTGGAG
TGCAGTGGTGCAATCTCAGCTCACTGCAACCTCTGCCTCCCAGGTTCAAGTGATTCTCCTGCCTCAGACTTCCAAGTAGCTGGGATTACAGGCATGC
CCCACCATGCCCAGCTAATTTTTGTATTTTTAGTAGAGGCGGGGTTTCACCATGTTGGCAAGGCTGGTCTTGAACTCATGACCTCAGGTGATCCACC
CGCCTCAGCTTCCCAAAGTGCTGGGATTACAGGCGTGAGCCGCCGTGGCAACCCGCATGCTTCTTATGTATAAGAAAAAAACAGCTAGAAAGTTGTG
GGTTCACTGGCTGGGCACATGGTGGCTTGTGTCTGTAACCTCAGCACTTTGGGAGGCTGAGTTAGGAGGATCATGTGAGGCCGGGAGTTCAAGACCA
TCCTAGGCAACATAGCCAGACCCTGTCTGTACCAAATAGAAAAAAAAATTAACTTGATGTGGTGGTGTGTGCCTGTAGTCTCAGCTATTTGGGAGGC
TGAGGTGGGAGGATCACTTGAGCCCAGGAAGTCGAGGCTACAGTGAGCTATGATTGTGCCACTGCACTCCAACCTGGGCAACAGAGCAAGACCCTGA
ATCAAAAAGAAAGAGATGTATTTGCCAACACAGGGGTGTTCTGCAGTGGGGTGGGAAGGGGACGTGTAGGACTTCATAGTTTCCTTTTTTTTGTTTT
AGAGACAGGGTTTAAAAAAAAATTTTTTTTTTTTTTTTGAGGCGGAATTTCATTCTTGTTGCCCAGGCTGGAGTGATCTCGGCTCACTGCCATCTCC
GCCTCCCAGGTTGAAGTGATTCTCCTGCCTCAGCCTCAGGCAATTTTGTATTTTTAGTAGAGACGGGGTGACTCCATGTTGGTCAGGCTGGTCTCAA
ACTCCCGACCTCGGGTGATCTGCCTGCCTTGGCCTCCCAAACTGCTGGGATTACAGGTGTGAGCCAGTGTGCCTGGCCCCTTTTTTTTTTTTTTAAG
TAGGGTCTTGCTAAGTTGTCCAGGCTGGTCTTGAACTCCTGGTCTCAAATGATCCTCCTGACTTGGCCTCCCAAAAGGCTGGGATTGCAGGAGATAT
GAGCCACCGCACCCGGCCCTTTTATAAGTTTTCTAAAGGAAAGGAACATGTACCATCGTGTTTTATTTTAATTTTTACATAGAAGCAGGAACAATAG
CATGAACCCCCAGACACGGCCCCCCAAGATGCGCTGTTCCGCTGTGCTGCAGCCCCATTTGTCCTTTTCTATACCATTTTTGGTTGTATTTGAAGCA
AATCCCTGACATCAGGGCATTTCATCCCAAAATACTTCCATCTGTGTTTCTAAAAAAACGAGGCCATTTTCTTATGTAACCACAACGTGATCAACAG
TAATCAATGCTTAACATCTAATTCTGGGCCACGTTAAGACCCTCCTGATTGGCTCAAGAATGTCTTTTGTGCAGTTGGTTTCTTGATTCTTTTTGTT
TTTTTTGAGACAGGGTCTCACTGTGTCACCCAGGCTGGAGTGCAGTGGTGCAATCACGGCTCACTGCAGCCTCAGCCTCCTGCCTCAGCGATCCTCC
TGCCTCAGCCTCCCAAGTAGCTGGGACCACAGGTTTGCACCACCACTCCCAGCTAATTAAAAAAAGTAATTTGTAGAGACGGGGGTGGGGTGGGGGT
CTTGCTATGTTGCCCAGGCTGGTCTCAAACTCCTAGACTCAAACAATCCTCCTGCCTTGGCCTCCCAAAGTGTTGCGATCACAGGCATGAGCCCCTG
TCCCTGGCCCCTATTATTTCTCTAACTGGGGAAAGTCATGTGGGAACAGATGTAGCTTGCCTTGGCCTCTGACCGGCCCTGCCTGCGTTCCTGGGTG
CTCTCTGCTGCTTCTCATGTGTGCCACTGTGGGGACTCGGCCGCCCACCCCACCCCGTGGTGTTACCTTGCGTGTGTAGTTCTGTGAGCTCAGGGCT
ATGGTCTGCCAGAACTAGGGGGCGTGGGGCCCCAGTACCAGCCCAAGGCCTCCTCTCTGCAGGTATGGACCTGTCTGCCAATCAGGACGAGGAGACC
GACCAGGAGACCTTCCAGCTGGAGATCGACCGCGACACCAAAAAGTGTGCCTTCCGTACCCACACGGGCAAGTACTGGACGCTGACGGCCACCGGGG
GCGTGCAGTCCACCGCCTCCAGCAAGTGAGTGCCTCGCTCCCACCTGTCACCGCCCCCACCACCTTGCCTGGGCTACCCCGCCTGACCCTGTCCCGC
CATCCCCCAGGAATGCCAGCTGCTACTTTGACATCGAGTGGCGTGACCGGCGCATCACACTGAGGGCGTCCAATGGCAAGTTTGTGACCTCCAAGAA
GAATGGGCAGCTGGCCGCCTCGGTGGAGACAGCAGGTAACACTAAAGCCCCAGTTCCCTGGAGCCGTCCTGGAGTCCTGGAGGGTCTGGCCATGCCG
TGGTCACTTGGTAGCCCCAGCCAAGGCCTGCTCTGTGCTGGGCATCCCCCCGGACTGGCCCCGCACTGTCCTACCCTGGGGCTGACTGCTGTGTGAC
CCCAGCTCCTGGCCCTCCCTCTCTGGTCACCCCAGCCTCCACCCCACTCCCTGCCAGGAGGCTCACTGACTCCCCTCTTTCTGGGACAGGGGACTCA
GAGCTCTTCCTCATGAAGCTCATCAACCGCCCCATCATCGTGTTCCGCGGGGAGCATGGCTTCATCGGCTGCCGCAAGGTCACGGGCACCCTGGACG
CCAACCGCTCCAGCTATGACGTCTTCCAGCTGGAGTTCAACGATGGCGCCTACAACATCAAAGGCAGGTTCTCCTGTGGGCAGCTGCTGGGCAGGGA
ACCCCTCGGTCGGGGCTGGGGTCAGTGCTGCGGGGAGCGCCCTCTGCATCCACACTGGACCCTGGCTTGGCTCAGGGCCATTCCAGGCCCTAAAGGG
ACAGGTGTCTGATGGCCACCAGGGGCTCTGGGATGCAAGCAGCCCCTTTCCCTCTTGTCTGTGTGGTTGGGGGGACTTACCTTGCCCACCTGACAGA
GAGGTGTGTGGAGGGGAGAGCAGGGAGGGGAAGGAGAGCAGGGAAGGGGAGGGAGGAGAGCAGGGGAGGGGAGAGCCGGGAAGGAGAGGAGAGCAGG
GGTGGGGAGGTTCTGGAAAGGGTGTGCAGGGGAGGACGCGCCTCGGTTATGGGACTGGAGCCCCTTCCCAGGAGGACCCCCAACAATCCAGAGGTGC
CTGTTAGGATTCAGAACATGGTTTTTTTGTTTGTTTTTTTGAGACTCACTCCCTCACCCTGGCTGGACTGCAGTGGCGTTATCTCGGCTCACTGCAA
CCTCTGCCTCCTGGGTTCAAGTGATTCTCCTGCCTCAGCCTCCCAAGTAGCTGGGATTACAGGTGTGCACCACCACGCCTGGCTAATTTTTATATTT
TTAAAATTTATTATTTATTTATTTTGAGACCCAGTCTGGAGTGCAGTGGCGTTATCTCGGCTCTCTGCAACCTCTGCCTCCTGGGTTCAAGCGATTC
TCCTGCCTCAGCCTCCCGAGTAGCTGGGACTATGTGTGGGAGCCACCATGCCTGGCTAATTTTTTTGTATTTTTCATAGAGACGGGTTTCACCATGT
TGTCCAGGCTGGTCTTGAATTCGTGGCCTCAAGTGATCCGCCCACCTCAGCCTCCCACAGTGCTGGGTTTATAGGTGTGAGCCACCACACCCGGCTA
ATTGTTTTGTATTTTTAGTAGAGACGGAGCTTCACTATGTTGGCAAGGCTGGCTCGAACTCCTGACCTCAAGTGATCCGCCCACCTCAGCCTCCCAA
AGTGCTGGGATTACAGGCGTGAGCCACTGCGGCCGAGCAGAACACGTTCTAGGACCCTTGTTCATGTGTCCATCATGGACAGGAGGACGTGCGGGCC
ATAGGGACCCTGGCTCATTCCGGAGCCGGGACTGGAGGGTGGGGCGTCACCCTTGGGAACACCCGTGCCCACCCTCCGCTGCCCAGGGTAGGGGTGG
GGAGCCAGGCTTTGGGCCCCACTTGATAAAGTCCCCTCCCCAGACTCCACAGGCAAATACTGGACGGTGGGCAGTGACTCCGCGGTCACCAGCAGCG
GCGACACTCCTGTGGACTTCTTCTTCGAGTTCTGCGACTATAACAAGGTGGCCATCAAGGTGGGCGGGCGCTACCTGAAGGGCGACCACGCAGGCGT
CCTGAAGGCCTCGGCGGAAACCGTGGACCCCGCCTCGCTCTGGGAGTACTAGGGCCGGCCCGTCCTTCCCCGCCCCTGCCCACATGGCGGCTCCTGC
CAACCCTCCCTGCTAACCCCTTCTCCGCCAGGTGGGCTCCAGGGCGGGAGGCAAGCCCCCTTGCCTTTCAAACTGGAAACCCCAGAGAAAACGGTGC
CCCCACCTGTCGCCCCTATGGACTCCCCACTCTCCCCTCCGCCCGGGTTCCCTACTCCCCTCGGGTCAGCGGCTGCGGCCTGGCCCTGGGAGGGATT
TCAGATGCCCCTGCCCTCTTGTCTGCCACGGGGCGAGTCTGGCACCTCTTTCTTCTGACCTCAGACGGCTCTGAGCCTTATTTCTCTGGAAGCGGCT
AAGGGACGGTTGGGGGCTGGGAGCCCTGGGCGTGTAGTGTAACTGGAATCTTTTGCCTCTCCCAGCCACCTCCTCCCAGCCCCCCAGGAGAGCTGGG
CACATGTCCCAAGCCTGTCAGTGGCCCTCCCTGGTGCACTGTCCCCGAAACCCCTGCTTGGGAAGGGAAGCTGTCGGGTGGGCTAGGACTGACCCTT
GTGGTGTTTTTTTGGGTGGTGGCTGGAAACAGCCCCTCTCCCACGTGGCAGAGGCTCAGCCTGGCTCCCTTCCCTGGAGCGGCAGGGCGTGACGGCC
ACAGGGTCTGCCCGCTGCACGTTCTGCCAAGGTGGTGGTGGCGGGCGGGTAGGGGTGTGGGGGCCGTCTTCCTCCTGTCTCTTECCTTTCACCCTAG
CCTGACTGGAAGCAGAAAATGACCAAATCAGTATTTTTTTTAATGAAATATTATTGCTGGAGGCGTCCCAGGCAAGCCTGGCTGTAGTAGCGAGTGA
TCTGGCGGGGGGCGTCTCAGCACCCTCCCCAGGGGGTGCATCTCAGCCCCCTCTTTCCGTCCTTCCCGTCCAGCCCCAGCCCTGGGCCTGGGCTGCC
GACACCTGGGCCAGAGCCCCTGCTGTGATTGGTGCTCCCTGGGCCTCCCGGGTGGATGAAGCCAGGCGTCGCCCCCTCCGGGAGCCCTGGGGTGAGC
CGCCGGGGCCCCCCTGCTGCCAGCCTCCCCCGTCCCCAACATGCATCTCACTCTGGGTGTCTTGGTCTTTTATTTTTTGTAAGTGTCATTTGTATAA
CTCTAAACGCCCATGATAGTAGCTTCAAACTGGAAATAGCGAAATAAAATAACTCAGTCTGCAGCCCCAGGCCGGCCTGTGTGTGTCTTGGGGCTGA
GGTGGGTGGGGGGGCTGAGGTGGGTGGGAGGGCTGGCGGGACAGGTAGGCGCCCTGGCTCCCCAGCTCAGTGCTGGGAGTGTGCAGTGGGAGGGAGG
CCGTGGCTCCAGTGGGTGCTCCGGAGCTCGTGGGCCCAGCACACCTCCTTAAGCGGGGGATGGAGCGCTGGGAGGGGGTGGACTGTGGCCCATGCGA
CCCCCAGAGCCATTAGGAGGAGTTCTGTGGTGAGAAGTGGCTGTGGCTCCTCGTAGGCTACGTCCACCATGCGGGGGACCTCGGGGGTGTCTGGCGG
TGGCACGCTGGATGTTGAGAAGGCGCAGCCCAGGGAACACTCAAACCAGGAGACCCCACATTATCCTCTAGTTGACATGTGCCCTTCGACTAGGGGA
CTTGGTGGTAGGGGCAGCTCCGCCCCCATACTGCGAGGATCCGGGCCTTCCACTTCCCCAGACACAGCAGGTTGGGGTGCCCCTGGGGCTGGGAGAT
GCTGCCCTGGGCCCCTCAGGGGGCGGCCGTGGTAGGATGGACCGGGCCGAGCGTGCAGACCCTGGGCAGGTCCCTACATCGGAACCAGCAGCCCTGG
GGATATCTGGCATATCAGAGGCTGAGGACTGTTTCCAGACTTTACCAAGGCCACAGTCAGGGCGACCTGGGTTCTGAGCCTCCCTTTGCATCCTAGG
CTGCAGGGACAGGGGCTGGGCAGAGGCTCGCGGACCTCGTGCAGCTTCATTCACTCCCAGGTGCCCCTAAGGATAGCAGCTGCGAGAAGACTGAGGG
GAGGAGCAGTAAGGCGCAGCCTGGAGCGGAGGGACCTGGCGTCCAGTCATTGTGCGCTGGGAAGGCGGTGATGGCGACGGAATTTGGGACACGCGGG
GCGTCCCGGGGGCAGCCAGGGCACTGCAGGCCGGAGCCCCCTGTTCCCCCGCATCCTCCCCGCCGTCGGCAGCAGAGCAAGCGCTGATTGGCTGCTG
ATGACGCAACTGGGAGGGCTGCGCTGTGATAGGTGGTCCCTCGGGGGCGTGGGGCGCAAGTCTTGAGATTGGCAGGGGCAGGTGGCTGCTGCAGAGG
GAAGTCGGGGTCACCTCAGCGAGGTTCCGGCGGCCACCCCTCTCCCCTCCCCCATGAAAGCCAGGCTGGAAGCCAGAAAAATCCCAGTGACTGGAAG
GGACAGATTAATCCTCCGGAACCAAACTCTTTGAGACCTGGGGAGGAGGGTGGGAGGCACTGGGAAGGGGGATTGGGGGGAGCCTGGCTCATTTCCA
CCCATGGAGCTGACCTAGAATGACCCTAAGGTCCCCGGAGCCACCAGCTGATTCCGAATTCCATTCATTCTGCAAAATTTGGCGCCTACCACGTGGC
CGAGATTCCCGAGGCTGCAGCCAATGAGCAGCATAGTCCGATGGGGGAGGCTGGAAGGGCCGTTCACGAGATCTCTCGGGAGGAATCGGTAGGAGCT
GCCCAACTGAAAGGGACGGGGGAATAACCCGGGGCGAGGGACCTGCCCAGGCCCTGCCCTCTGGGGGGAAGCCAGGCCAGGGGCCGGGGGCATCTCT
GGGGTCCCAGGTGAGATGCGGGTCGAGGGAGCCAGGCCACGGTTCTCCAGACTCGCGTGGAGGCCACGAGCGTCTTCTGGAGGAGCGGGCACTGCGC
GGACCGGCAGACTCTGGGGCGCTCGTGCTCCCCATCTCCTGACCTTTTCCTACCTTCAGTTCCCTCCTGTCAGGACAGGTTCTGGGGCTCGCCGGGG
CAGGGAGCCAGGGCAGAGGGTGCAGTTTCCGCTCCTGCCTGAGTCACCTTCGCTTTCTCAGCGATTCTTCATTCACAAGGGCGTGGCCCATCACACG
CACTCACACACTTGTGAACTTGCACGCACACACACATATGGACCTGTGCAAAGAGCCCCATGCACAGGCAGGTACACGTGCATGTAGGCGTGCACAC
AGACACGCACAGATGCAGGCAGACCAACTCCCAGGAATCTGTCTCCAGCCTACAGGGATTCAGCACTCAGGGTACCAGCCTCTGTCCCGTGCACCCC
CATTCCCGGCAGTTCTCCCAGGTGGGTCGGGGGCCACTAGGGACCCCATACCCCGAGGGTGGCTCCTCCATTAAGCCTGCCATGGGGTTGGGAGTGA
GAGTCCCACCTCCCACTTGAGAGTCCCCAGTGAGTCAAGGCAAGTGCAGCCAGGGGTCCAAGATCCTTGTTGGGATTCACTGTGATCCCCAAAGATC
ACGACTTAAGGGAAAACATTCAATTAAACTTGTTAGAGCAAAGAAAGGAGAGACTGGGCTGGGAGCAGTGGCTAACGCCTATATAGTTCAGCTACTC
AGGAGGCCCAGGTGTGAGGATTGCTTGAGTCCAGGAGGCTGAGGCTGCAGTGAGCTATGATGGCACCACCCACTGCACTCCAGCCTGGGTGACAAAG
CAAGACCCTGTCTCAAAAAAAAAAAAAAAAAAAAAAAAAAAGGAAAAAGAGGCCGGGCACAGTGGCTCACACCTGTAATCTACTAAAAATAAGAAAA
TTAGCCAGACATGGTGGTGGGTGCCTGTAATCTCAGCTACTTGGGAGGCTGGGGCAGGAGAATCGCTTGAACCCAGGAGGCGGAGGTTGTGTGAGCC
GAGATTACACCACTGCACTCCAGCCTGGGCGACAGAGTGAGACTCTGTCTCCAAATAATAATAATAATAATAATAAAATAAAAAGAAAAAAGAAAGA
AAGAAAGGAGAGACTGAGCTATATTGCCCAGTCCAGGCATGTGGGCAGTCTGGGGGACAGTGGGGCATACTCGGTGTCTCAGGGTCCCAGCCCTGGG
TGCCCCCACTGCTGTCTGCTGTGACCTCCTCAGGAGGCCTCATTGGGAGGGACCCTGAGTCCTGCGGGGGGCTGTGGAGCTGTCACCAGCCCCAGGA
GGACTCAGGCAAGTCCCTCTGGTGGTCGAGGCCTCTGAGCTTCCCAGTGTGTCTCCACGGGACACCCCCCCTCCAGACCTTCTGCCCCAGCTCAGCC
TCTTCCAATTCATTATCAGGGGGTGGGGGAGGGGACAGGAAGCCCCAGACCCAGCTGGGCCCCATTTCCTCCAGGGCCACAGTGGCCTCTCCCAGAG
TCACGAGGATGGGGGCTGATCTCACTCTTTTTTTTTTTTGAGACGGACTCTCACTCTGTCGCTTTTTTTTTTTTTTTTTTTTTTGAGACGGAGTCTC
ACTCTGTCGCCCAGGCTGGAGCGCAGTGGCGTGATCTCGGCTCACTGCAATCTCCACCTCCCACGTTCAAGCGATTCTCCTGCCTCAGCCTCCTGAG
TAGCTGGGACTACAGGTACGTGCCACCACACCTAACTAATTTTTGTATTTTTTAGTAGAGATGGGGCTTCACCATATTAGCCTCCCAAAGTGCTGGG
ATTACAGGCATGAGCCACCATGCCCGGCCTTGACTTCACTCTTTTAAAAAAGTCAAATACTTGGTGCTTGAAATCCCAGCACTTTGGGAGGCTGAGG
CAGGAGAACTGCTTGAGCTCAGGAGTTTGAGACCAGCCTGGGCAACATGGTGAGACTCCTGTCTCTGTAAAAACTACGAAAATTAGTCAGGCATGGT
GGTGCGTGTCTGTCGTCCCAGCTGCTCAGGAGGCTGAGGTGGGAGGATGGTTTGATCCTGGAAGGTTGAGACTGCAGTGAGCTGTGATTCCACCACT
GCAGTCCAGCCTGGGCCGCAGAGCAAGACTCTCTCTCAAAAATAAATAAAATAAAATAAAAAGTCTAAAACTTTTCTTTCAAACGACGGCTTTTGGG
GCTCATAAGGTGCGTGAAGATGGAAAGGGGGCCCGGCAGTGCCCATTTCGGCTCCCTTGGGACCCCGGCTTCCCTGAAGACCCCTGAGCAATGGTTG
GCTGGGTGCCTGGTCTCCCTGAACGGGCTGTGGGCAACAAGGTTGTCTGGATGGGGGAGGGGCTCTGAGACCCTTGGGGGCAGCAGAGGGAGAAGGG
AACAGATGGGGTCTCCCAGGCAGAGAGGCCTGGAGGGGTGGGGCGGGGCAGGGCATTTGGCGTGAAACCCAAGCCCCTTAACGGGGCCCTAGCTTAA
ACCGGGAGGAGGGGCCTCTGTGATGTGCAAATAATTAACACAGAAGCCTTCACTGTGCTCCCCTCCTCATCCCAGGACCCAGGTCTGACCCTCAGGA
GGGGAGGAGGTGAGCAAGGGGGGAACCCACCTTCCAGGGAACCCCCAGATAGTGCCAGGCACCAGGCAAGTGCTCTAAAAGGCTTTACTAATATTAT
TTGAAGAAACTAAGCTAATAAATAAATACGGTATAAAATCAAAGGGTACCCACAGATATAAACAAAAATCCACAGCTAACCCGGCCCCAGCCCTCTT
TCCTTTGGAGGTAACTGTGTTAATGGTTTTTTACACCCCTCTGGAATTTTTTTTTTTTTTTTTTTTTTTTTTTTTTTTTTGGGAAGGAGTCTGGCTC
TGTCGCCCATGCAGCGCAGTAGCGTGATCTCGGCTCACTGCAACTTCCACATCCCGGGTTAAAACGATTCTCCTGCCTCAACCGCCTGAGTAGCTGG
GACTACAGGGGCGCACCACCATGCCCGGCTAATTTTTTTTTTTTTTTTTTTTTTTTTTGAGCTGGAGTCTTGCTCTGTCGCCCAGGCGGGAGTGCAG
TGGCGCAATCTCGGCTCACTTGCAAGCTCTGCCTCCCGGGTTCACGCCATTCTCCTGCCTCAGCCTCCTGAGTGGGTGGGACTACAGGCTCCAGCCA
CCACGCCCGGCTAATTTTTTGTATTTATTTTTTAATAGAGATGGGGTTTCACTGTGTTCGCCAGGATGGTCTCGATCTCCCTTTTTTTTTTTTTTTT
TTTAGACGGAGTCTCGCTCTGTCGCGCAGGCTGGAGTGCAGTGGCATGATCGTGACTCACTGCAAACTCCACCTCCCGGGTTCACGCCATTCTCCCG
CCTCAGCCTCCCGAGTAGCTGGGACTACAGGCGCCCACCACCACACCCGGCTATTTTTTTGTATTTTTAGTAGAGACAGGGGTTTCACCATGTTAGC
CAGGATGGTCTCGATCTCCTGACCTTGTGATCCTCCTGCCTCGGCCTCCCGAAGTGCTGGGATTACAGGCGTGAGCCACCGCGCCCGGCCTCTTGTT
TTTTTTTTTTTTTTTTTTTATAGACTTCTAAGGAAAGCAACACTAAGAAAATATATTTTTAAGAAATTATTCAGCCAGGCGTGGTGGCTCACGCCTG
TAATCCCAACACTTTGGGAGGCTGAGGCGGGTGGATCACTTGAGGCCAGGAGTTTGAGACCAGCCTGGCTCACATGGTGAAACCCTGACTCTACTAA
AAATACAAAAAATTAGCCGGGCACAGTGGCATGCTCCTGCAATGCCAGCTACTTGGGAGGCTGAGGCAGGAGAATCCCTTGAACTGGGGAGGCAGAG
GTTTCAGTGAACCAAGATCGAGCCACTGCACTCCAGCGTGGGTGACAGACTGAAACTGTGTCTCAAAAAAAAATTTTTGTTTTTGGAGATGGGGTCT
TGCTCTGTCACCCAGGCTGGAGTACAATGGGGTGATCTAGGCTCACTGCAACCTCAAACTCCTGGGCTCAGGTGATCTTCCTGCCTCAGCCCCTGGA
GTAACTGGCACTACAGGTGCATGTCAGAACACCTGGCTAGTTTTTAACTTTTTTGTGTGTAGACAGGGTCTTGATATGTTGCCCAGGCTGGTCTCCA
TCACCTTCTGGGCTCAGTGATCCTCCTGCTTCAGCCTCCCAAAATGCTGGGATTACAGGTGTGAGCCACCATGCCCGACCCTGAGGGATACCTTAAT
GTTTATTTCTCACATTTCTTCTAGAACAAACATTGCCAGCGCATCCCAGACTCTGAACTGTGGCTGGGGACTGCAGCATGGAGGTCTTTGCAGGCAC
TCTGGGAAACATGCCACAAGCAGGGTATTAACCCAAGACAGTCAGTCCCTCCAATGAGAAAAAGGAGCCGAGGGACTGTGCATGCCTCAGAGCCAGA
TGCAGCAGAACTGGTGGGTTGAGGGGGCACTGAGCGCCTGGTGCCTCCTGCTGCCCCCCACCAGCTCCGACAGTCCTCGTCCTTGTCCTCCCCATCA
GAAGGGAAGAGTGAATTGTCTGTGGGATGTGCCAGTGTCCCCGGTTCTGAGGTTGGGCAGGCTGGGGAGCCCCAGACATGGCTTGCTGCCCACTGTG
GAGCCTCCTGGACTTAGTTCCAGGCTCTGCCCGATCCTCTGAGGGTGTGGCTTCAAAGCCCTGCTTGGGCCTAAGGCCATCCCAGGGCAGTGACTGA
GGGTAGACTGAGATGTCCCTTGGGCACCAGTCCTAGGGTACCTGGGCTGGGGGTCTTCAGCTCAGGCCCCCTAGTGCCCGTCCTTTGGGCTGTGGGC
AGGTTTCCACAGCACTGGCCCTTTCTGACGTTACACCCCTGTGCATCCTCACTGGGGCTCTGTGAAGGTGAAAGTCACACTAAGGACTGTGCCTATG
GTGGCCAGGGCACCCCACCGGCAGCACACCTCAGAGGCCTCATCCTAGGCGCTGCTCACTTTTTTTTCTTTTTTTTCCTTTTTTTTTTTTTTTTTTT
TTCCGAGACAGAGTCTTGCTCTGTCACCTAGGCTGGAGTGCAGTGGCATGATCTCGGCTCACTGCGACCTCCTCCTCCTCCTGGGTTTAAGCAATTC
TCTTGCCTCAGCCTCCTGAGTAGCTGGCATTACAGGTGCCCGCCACCACGCCCGGCTATTTTTGTAGTTTTAGTAGAGACGGGGTTTCACCATGTTG
GCCAGGCTGGTCTCAAACTCCTGACCTTGTGCTCTGCCCGCCTTGGCCTCCCAAACTGCTGGGATTACAGGCGTGAGCCACTGTGCGTGGCCCTGCT
CATTTTCTTACCACAGCTTTCCAGAAATAAAGTTAGGATGGAAAGAGAGAGAGAGAGATTGAGAGAGAGAGAGAGCACCACATTCAGATAGAGACAG
GAGAGTTCTCAGCAAGAAGAGAACTCAGCTCAGAGTTGAGAATGTCTCAACTCAGCTGTCTCCCTGCTGAGACGTCCTGGGCTGAAGTGTCCCCTCA
CCCCTGCGGGGCTGTGACTGCACACTGCACACATGGGTCACAGCAGGGCTTGGCGTTTGGAGCAGGCCGGGTTGGTGGCTTGTCCTCATCTCTTGCC
TGGAGCTGTGCTGGCCTGTGGTTTGCTTTGGCTGCTACCATGTGGAGGGAGAGGTGCTTGTGTCCATGCCTGGCCTCTTGGAAGGCCACCACTGTGA
TGGAGAGAGGAAGGCCACCACTGTGATGGAGAGAAGCCGGGGCCAGACCGATGAGGGCTGAGAGCCCATGGGCAGGGGTTGTGGTCTCGGCCAAACC
CCAGCTGGCAGCTGATGGCAGCCACCCCGGGGTCCTCAGATATGGCACAGCTGCCTGGCTGAGCCTCGGCAAAGGGAAGCCTTGTGGAAAATAGCAA
CTCAGGGATGTTGTGAGTAGTGGGCTGAGCTGTGGTTTATTTTTTAGAGACAGGGTCTTGCTCTGTCACCCAGGCTAGAGTCCAGTGGTGTAATCAT
AGCTCACTGCAGCCTTGACCCCCCAGGCTCAAGTGATCCTTGTGTCTTGGCCTCCTGAGTAGCTAGGACTATAGGTGCATACCACCATGCCTCGCTT
GTTTTTTGTTTTGATAGAGATGGGGGTCTTGCTAGGTTGCCCAGGCTGGTCTGTAACTCCTGGGCTCAAGTGATCCTCCTGCTTTGGCCTCCCAAAG
TGCTGGGATTACAGGCGTGAGCCACTGTGCTGGCCTTGGGGTGTGGTTTTATGTGGCCATAGATGACTGAGATGGGTGAGAAGCGGGACCTAGGGGA
ATATACAGGGCAGGGGGATCCGACAGGGGGACAGGAGGGCAGACAGCTCCTGGAAGGCCTGGGAAAGAGATATCAGGGCTGGACCCTGGAGAAGTGA
GGCTTTGAGGGAGGGGAGGAGATGGGGCCTGGCGGGGTACGGGCGCTGCTCCTAGGTCTGAGGGCATCGGCGGTCTGAGAGCTTGCGGGAGGGAGGG
CTGCCTCCCGGTGCTCGGTGCCCTGGCTCTCCTCCTTGCTGCTGGCTGGCCTCCTCCTCCTCATGCATCTGTGTGTCCTGGAACACAGGGCACTGTC
CCTCTGCCTGTCCAGAAAAGCACGTGCTCCTTGGGGCCTGGCCTGCTCAGCCCTATGTCCCACCCGCTCCCTGCTGCTATTCCCAGGCCTTCGGGCC
TCACTGCCTGGGGTGGCCGTGCTCAGCCCCACCCTGTGGTGCCATGGCCTCCCCACCCCTGCCCCGAACTGCCCCTGGGACCAGTTCCTTCAGCTCC
CAGGACAGGGCCTGGCCATCCCTGTGGATTCTCCCTGTTCGTGGACCCCCATTGGTGCCCAGTCTCCTTGGACTGTCTTCTGAGCCTCTCTCAGATG
TACCCCCAACTGTACCCTTTCACCCAGAGGCCATTTGGCAGCGTCCTCCAGGACTCCTGCCGTGGGGGAAGTCTCCACCAAGGCCAACGCGTGACTG
CATCCCGAGGAGCTGATTTAAGATCTGGTTCTCAGGAACACCTGGAACTGGCCAGTCAGCATCCCCGGCCCTGCGGTCTGCACTTGGACAAGGGTCA
GGCAATGAGGATGAGCAGCAGGCGGGGCTTCTCCTGGAAGCCTTCCCAGCCTCCTGGGCCACTCCAGTGGGTCCCCTCCACAGACTCAGCCTGTTCC
CTGCCACCTGGTGCCGGTTTCTCTGTGGCACCTACTAGGGGCCGAGTGCCCCGGGACTGCCCAGCTGAGCAGCGCCGTCCAGGTCTGCACCCAGCTA
CACTCAGGGCACGTGCACAGGTGAGCAGCCGGGCACGCAGGCACCTGCCAGGTGTGGGTGTGGACTAGGTGCTCCCGG
HUMAN SEQUENCE - mRNA
GCGGAGGGTGCGTGCGGGCCGCGGCAGCCGAACAAAGGAGCAGGGGCGCCGCCGCAGGGACCCGCCACCCACCTCCCGGGGCCGCGCAGCGGCCTCT
CGTCTACTGCCACCATGACCGCCAACGGCACAGCCGAGGCGGTGCAGATCCAGTTCGGCCTCATCAACTGCGGCAACAAGTACCTGACGGCCGAGGC
GTTCGGGTTCAAGGTGAACGCGTCCGCCAGCAGCCTGAAGAAGAAGCAGATCTGGACGCTGGAGCAGCCCCCTGACGAGGCGGGCAGCGCGGCCGTG
TGCCTGCGCAGCCACCTGGGCCGCTACCTGGCGGCGGACAAGGACGGCAACGTGACCTGCGAGCGCGAGGTGCCCGGTCCCGACTGCCGTTTCCTCA
TCGTGGCGCACGACGACGGTCGCTGGTCGCTGCAGTCCGAGGCGCACCGGCGCTACTTCGGCGGCACCGAGGACCGCCTGTCCTGCTTCGCGCAGAC
GGTGTCCCCCGCCGAGAAGTGGAGCGTGCACATCGCCATGCACCCTCAGGTCAACATCTACAGTGTCACCCGTAAGCGCTACGCGCACCTGAGCGCG
CGGCCGGCCGACGAGATCGCCGTGGACCGCGACGTGCCCTGGGGCGTCGACTCGCTCATCACCCTCGCCTTCCAGGACCAGCGCTACAGCGTGCAGA
CCGCCGACCACCGCTTCCTGCGCCACGACGGGCGCCTGGTGGCGCGCCCCGAGCCGGCCACTGGCTACACGCTGGAGTTCCGCTCCGGCAAGGTGGC
CTTCCGCGACTGCGAGGGCCGTTACCTGGCGCCGTCGGGGCCCAGCGGCACGCTCAAGGCGGGCAAGGCCACCAAGGTGGGCAAGGACGAGCTCTTT
GCTCTGGAGCAGAGCTGCGCCCAGGTCGTGCTGCAGGCGGCCAACGAGAGGAACGTGTCCACGCGCCAGGGTATGGACCTGTCTGCCAATCAGGACG
AGGAGACCGACCAGGAGACCTTCCAGCTGGAGATCGACCGCGACACCAAAAAGTGTGCCTTCCGTACCCACACGGGCAAGTACTGGACGCTGACGGC
CACCGGGGGCGTGCAGTCCACCGCCTCCAGCAAGAATGCCAGCTGCTACTTTGACATCGAGTGGCGTGACCGGCGCATCACACTGAGGGCGTCCAAT
GGCAAGTTTGTGACCTCCAAGAAGAATGGGCAGCTGGCCGCCTCGGTGGAGACAGCAGGGGACTCAGAGCTCTTCCTCATGAAGCTCATCAACCGCC
CCATCATCGTGTTCCGCGGGGAGCATGGCTTCATCGGCTGCCGCAAGGTCACGGGCACCCTGGACGCCAACCGCTCCAGCTATGACGTCTTCCAGCT
GGAGTTCAACGATGGCGCCTACAACATCAAAGACTCCACAGGCAAATACTGGACGGTGGGCAGTGACTCCGCGGTCACCAGCAGCGGCGACACTCCT
GTGGACTTCTTCTTCGAGTTCTGCGACTATAACAAGGTGGCCATCAAGGTGGGCGGGCGCTACCTGAAGGGCGACCACGCAGGCGTCCTGAAGGCCT
CGGCGGAAACCGTGGACCCCGCCTCGCTCTGGGAGTACTAGGGCCGGAAAGTCCTTCCCCGCCCCTGCCCACATGGCGGCTCCTGCCAACCCTCCCT
GCTAACCCCTTCTCCGCCAGGTGGGCTCCAGGGCGGGAGGCAAGCCCCCTTGCCTTTCAAACTGGAAACCCCAGAGAAAACGGTGCCCCCACCTGTC
GCCCCTATGGACTCCCCACTCTCCCCTCCGCCCGGGTTCCCTACTCCCCTCGGGTCAGCGGCTGCGGCCTGGCCCTGGGAGGGATTTCAGATGCCCC
TGCCCTCTTGTCTGCCACGGGGCGAGTCTGGCACCTCTTTCTTCTGACCTCAGACGGCTCTGAGCCTTATTTCTCTGGAAGCGGCTAAGGGACGGTT
GGGGGCTGGGAGCCCTGGGCGTGTAGTGTAACTGGAATCTTTTGCCTCTCCCAGCCACCTCCTCCCAGCCCCCCAGGAGAGCTGGGCACATGTCCCA
AGCCTGTCAGTGGCCCTCCCTGGTGCACTGTCCCCGAAACCCCTGCTTGGGAAGGGAAGCTGTCGGGAGGGCTAGGACTGACCCTTGTGGTGTTTTT
TTGGGTGGTGGCTGGAAACAGCCCCTCTCCCACGTGGGAGAGGCTCAGCCTGGCTCCCTTCCCTGGAGCGGCAGGGCGTGACGGCCACAGGGTCTGC
CCGCTGCACGTTCTGCCAAGGTGGTGGTGGCGGGCGGGTAGGGGTGTGGGGGCCGTCTTCCTCCTGTCTCTTTCCTTTCACCCTAGCCTGACTGGAA
GCAGAAAATGACCAAATCAGTATTTTTTTTAATGAAATATTATTGCTGGAGGCGTCCCAGGCAAGCCTGGCTGTAGTAGCGAGTGATCTGGCGGGGG
GCGTCTCAGCACCCTCCCCAGGGGGTGCATCTCAGCCCCCTCTTTCCGTCCTTCCCGTCCAGCCCCAGCCCTGGGCCTGGGCTGCCGACACCTGGGC
CAGAGCCCCTGCTGTGATTGGTGCTCCCTGGGCCTCCCGGGTGGATGAAGCCAGGCGTCGCCCCCTCCGGGAGCCCTGGGGTGAGCCGCCGGGGCCC
CCCTGCTGCCAGCCTCCCCCGTCCCCAACATGCATCTCACTCTGGGTGTCTTGGTCTTTTATTTTTTGTAAGTGTCATTTGTATAACTCTAAACGCC
CATGATAGTAGCTTCAAACTGGAAATAGCGAAATAAAATAACTCAGTCTGC
HUMAN SEQUENCE - CODING
ATGACCGCCAACGGCACAGCCGAGGCGGTGCAGATCCAGTTCGGCCTCATCAACTGCGGCAACAAGTACCTGACGGCCGAGGCGTTCGGGTTCAAGG
TGAACGCGTCCGCCAGCAGCCTGAAGAAGAAGCAGATCTGGACGCTGGAGCAGCCCCCTGACGAGGCGGGCAGCGCGGCCGTGTGCCTGCGCAGCCA
CCTGGGCCGCTACCTGGCGGCGGACAAGGACGGCAACGTGACCTGCGAGCGCGAGGTGCCCGGTCCCGACTGCCGTTTCCTCATCGTGGCGCACGAC
GACGGTCGCTGGTCGCTGCAGTCCGAGGCGCACCGGCGCTACTTCGGCGGCACCGAGGACCGCCTGTCCTGCTTCGCGCAGACGGTGTCCCCCGCCG
AGAAGTGGAGCGTGCACATCGCCATGCACCCTCAGGTCAACATCTACAGTGTCACCCGTAAGCGCTACGCGCACCTGAGCGCGCGGCCGGCCGACGA
GATCGCCGTGGACCGCGACGTGCCCTGGGGCGTCGACTCGCTCATCACCCTCGCCTTCCAGGACCAGCGCTACAGCGTGCAGACCGCCGACCACCGC
TTCCTGCGCCACGACGGGCGCCTGGTGGCGCGCCCCGAGCCGGCCACTGGCTACACGCTGGAGTTCCGCTCCGGCAAGGTGGCCTTCCGCGACTGCG
AGGGCCGTTACCTGGCGCCGTCGGGGCCCAGCGGCACGCTCAAGGCGGGCAAGGCCACCAAGGTGGGCAAGGACGAGCTCTTTGCTCTGGAGCAGAG
CTGCGCCCAGGTCGTGCTGCAGGCGGCCAACGAGAGGAACGTGTCCACGCGCCAGGGTATGGACCTGTCTGCCAATCAGGACGAGGAGACCGACCAG
GAGACCTTCCAGCTGGAGATCGACCGCGACACCAAAAAGTGTGCCTTCCGTACCCACACGGGCAAGTACTGGACGCTGACGGCCACCGGGGGCGTGC
AGTCCACCGCCTCCAGCAAGAATGCCAGCTGCTACTTTGACATCGAGTGGCGTGACCGGCGCATCACACTGAGGGCGTCCAATGGCAAGTTTGTGAC
CTCCAAGAAGAATGGGCAGCTGGCCGCCTCGGTGGAGACAGCAGGGGACTCAGAGCTCTTCCTCATGAAGCTCATCAACCGCCCCATCATCGTGTTC
CGCGGGGAGCATGGCTTCATCGGCTGCCGCAAGGTCACGGGCACCCTGGACGCCAACCGCTCCAGCTATGACGTCTTCCAGCTGGAGTTCAACGATG
GCGCCTACAACATCAAAGACTCCACAGGCAAATACTGGACGGTGGGCAGTGACTCCGCGGTCACCAGCAGCGGCGACACTCCTGTGGACTTCTTCTT
CGAGTTCTGCGACThTAACAAGGTGGCCATCAAGGTGGGCGGGCGCTACCTGAAGGGCGACCACGCAGGCGTCCTGAAGGCCTCGGCGGAAACCGTG
GACCCCGCCTCGCTCTGGGAGTACTAG

[0292] TABLE II

MOUSE NOMENCLATURE
ICSGNM Map3k6
Celera mCG20807
HUMAN NOMENCLATURE
HGNC MAP3K6
Celera hCG19300
MOUSE SEQUENCE - GENOMIC
GGGCTGGACCTTCACAGAGAGGCAGAGCTACACAAGGCAATACCAATTCTCTGGGGCCTGAGGGAGGAAATGCCCCAAACCCTGCTGGCTCCAGTTG
AGGTGGTGTGCCTCTGGGAGACAATGGGGAGAAGTCTTGCTTCAAGTTATTTCCCCCACAGCCTGATCCATCTATGCTGGCACCCCCCTCTAGTAGA
CCCTACAAGATGGGTCTACTATGAGCCCTACTGTTCTAGCTGCTCCTATTTAAAGGGCTGCCTGCCTGAGGGTACAGGGTCACCCCAGCTGCCCATG
TAGGGTCCTACAAATGCTCACCACATCAACCACTCATTCTCTCCTCATCTCAAGAAGCAGGGTGAGAGAGTTTGGTAATCTGGCCTTTTCATGTAAA
TTTATGTAAATAGGATATAAATATCACAACATATGTAAATAGGATATAAATACCACAGAACCTCAGCATCTCAGGAGGTCCTGATATCTAGAATCTA
GGAGGTAGAAGGAATGGCAGAAAAGTCTGGAGGAGATATGTTCGCCCTGTGCCCGTTGGCCCTGTGTTTCCATGTAGAACCCAGGGAGCTGGAGCTG
GAGCTGGAAGCCAGCAAAGTGGTCCCCCTGCCCAGTTATTCAGGTGTCCCAAGAAGTCCTAGAGAGAAGAGATCTGTAGGTTCTCAAGGTAAGGGAT
GTCAGGGACCTGGCAGAGAGGGCTCTCGAGGTAGCCTGTAGAGGCTGGATGTGGCTGCTTGGGTAAGAATGGCTCTCATAGGCTCATATATTTAAAT
GCTTAGTTATTAAGGAGTGGTACTATTTAAGAAGGATTAAGAGGTGTGGCCTTGTTAGAGGAGGTGTGTCACTGGGGGTGGGCTCTGAAGTTTCAAA
AACCCAACTCTGTCTTCCCTCTGCATGCCTTTGTGTGTATCTTTCTGTCTTAGGATCAGGATGTAGCCGGAAACTACTTCTCCAGCAGCATCCCTGC
CTCTGTGACCTCGTGCTCCCCACTATGGTGATTGTGGACTAAACCTCTGAAACTGTAAACAATCCCCCAGTTAAATGATTCTCTACAGGAGTTGCTG
CCTTCGTGCCCAGCACTCAGGAGGCAGAGGCAGGTGGATCTCTGTGGGGTCAAGGCCAGCCTGGTCTACAGAGTGAGTTCTGGGACAGCCAGGGATA
TACAGAAAAGCCTGTCTCAACAAACAAACAAACAAATAGGAAAGGTAGTCATGGTCATTGTGTCCCCTCCCAGCAATAGAACACTGACTAAGACACT
GGGGTGCAGGTGCTGAGTGTGGACAATGACGACGTGGGAACCACCTCTGCACCAGGCTCCAAGTGGGAGAGTGCCAGGATCCTGGGGTGTACCAGGT
AGATTGCATTGTTCATGTTTTACTGCAGAGGACTGTGAGGCTCAGAAAGGAACAATTGCTTGTCCCCAATACAGAGCCAGAAAAGGATGCTAATAGG
TGAGAACACCAAATTCTGTTTCCTCCTCTTCCTCTTCTTCCTTCTCCTCCTCCTCTTCCTCTTCTTCCTTCTTCTCCTCCTCTTCCTTTTGTCTTGA
GCACTGGGCAGGACACAGGACATCTGCCTCTGGAATTCCAGGGCTACCTTGGCTCCCTAGGCAAGATGGATCCCAAGGGAGAGTCTACCCTCTGACT
TTACTTTTTGCACAGACTAGGGCTGGGCCCTCTCAGCTACTTAGGGCTGTAAGTGCCCTCGGAGGAGCCAGCATTGGAAGGAGTAGTAAGAATTTGG
AGGAGCGGGGGCTGGAGAGGTGGCCCAGTGGTTAAGAGCACTGGCTGCTTTTCCAGAGGTCCTGAGTTCAATTCCCAGCAACCACATGGTGGCTCAC
AGCCATCTGTATTGAGATCTGACGCCCTCTTCTGGTGTGTCTGAAGACAGCTAGAGTGTGCTCATATACATAAAATAAATAAATCTTAAAAATAATA
ATTTGGAGAAGGGCTGGCTCTGCCCCATGCTGGCTCATGGGGCCTCCCTTAGGGTACTCAGACCTCAGAGTCAGTTGACACCTGGTCCTTTATCTCT
GGGCAGGACATCAGCCACCTGCTCTGCCACTAAGAGGCTAAGGAGGCGTCCACGGGAGTGAGGAACTTGGAATCAGGCCAGACGGGGGTGGTGGAAG
TTTCCAGGCATGTAAGCCTCTCCTCGTAGCTCTATAGTGCGCACCTCTTCCCCAGGTCCCAGGATCTGAGAGGACTGCTCGGTCCCTTACTTGTTCC
AGAATCTGGGTGGAGGCTTTTGGGAAACAACTTGGGGGCCTTTCTCAATCCACCACCCCCCCCCCTTTCCCAGGTCTCAAGAACTTTTCCAGTCTTT
CCCATTTTTTGGACACTCCAGGGGGTAAGAAAAAAAAGAGGCAACAGGCAAAGCCCGGTGGTGACTTCTCTCTAACTCCCTAGGGGGAGCCAGAGTC
CACTGAAGCCAGGCATACCTGACAGGACAGCTCCTACAGGGCCAGAAGTCTGAGAAGGCTTCATGGAGGAGGTGTTATTTGGAGGAAAGTAAAGGCT
CTGTGAACATTCTCTAGGTCTGTGAGTGCAGAGTACTTTGCGGGTAGAAATAAAGGCGAGCAGGAGGAGGTGGGAGAGAGGAAAGGCTAAGGAAAGT
AAGCTGGGGGTCGTGGGAGAGCCAAACATGAACCCAGAATCTTTGCAAAGGCCACTTCATAGAGGACATTGCATTACTGACATGGAGGGCAAAGGGG
AGCCATGGAAGAATTTTAGGCAGAAAAGGGTCTGGGTCAGACTTAGTTTTAGAAAGATAAGTCAAGAGGCTGGAGAGATGGCTCAGCGGTTAAGAGC
ACTGGCTACTCTTCCAGAGGTCCTGAGTTCAATTCCCAGCAACCCCACATGGGGCGACTCACAACCATCTGTAATGTGATCCAGTGCCCTCTTCTGG
TGTGTCTGAAGACAGCTACAGTGTACTCATATACATAAAAAAATAAGAGAAAGATAAGTGAGGCGTGGAAGTGCTTGCCTGTAACCCTAACACTTGG
GAGGCCGGGGGCAGAGGTATTGAAATTAGGGGCCTGGAGTGGGCCCAGGGAGGCCCTGTCTCAATAACAAGCGACATGGGGTTGGAGAGTGACTTTA
TGGTTAAAAGCAAGCATTGACTGCGGAGCGCCCCCACTGGATAGCTCATAACTGCCCCTACCTCCAGCTGCAGCAGATCTGACGTGCTTGTCTAGAG
TCCTCGAGCATCTGCGCACTGATGCACACACATTCTCTCTGTTAGACACATGACACCTATACTCACACGTGCATACACACACACACACACTCTACTC
TCTCCCTCTCTCACCTATTTTTAATCTAAAAACATAACAAAACAATAACAGGCTGCACCCTAGAAGAGACACTGGATGGGGCAAGGCAGAAGGTGGA
GACAGAGGTTAGGAATGGACAAGGCAGAAGACCAGAAGACCGTGGGAAGTGACATCCACAGTATTGGACATATGTCATCTGAAAGATACTGGAAGAG
CAGCAAGCACCACCCCCACCCCACCCCACCCCCCTAAGATTTCCCTGCATAGCGATGGAACTTGCTCTGTAGACCAGGCTGGCCTCCAACTCCCAGA
GATCCCATCTCCCGAGTGCTGGGATTGGGGAGCTTGCCACACCACTGGGCTGTCCTAAGAGCAGAGCTCCAGAGCTGGAGGACGACTTGGCTTGGGA
GAGGGAGAAAAGGCCACGGGAAAAGGCTAGGAATCCAGCTGAGGCCTCTGGGGGCAACATCTATGCTCTAAATATCTTGGTGGTTCTTCTTCTTCTT
CTTCTTCTTCTTCTTCTTCTTCTTCTTCTTCTTCTTCTTCTTCTTCTTCTTCTTCTTCTTCTTCTTCTTTTCCTTCTTTTCCTTCTTTTCCTTCTTT
TCCTTCTTTTCCTTCTTCTCCTTCTTTTCCTTCTTCTCCTTCTTCTCCTTCTTCTCCTTCTTCTCCTTCTCCTCCTTCTCCTCCTTCTCCTCCTTCT
CCTTCTTCTCCTTCTTCTTCTCCTTCTTCTCCTTCTTCTCCCTCTTCTCCTTCTTCTCCTTCTCCTTCTTCTCTCCTCCTCCTCCTCCTCCTTCTGT
AAGTATATATATATATATATATATATATATATACCATAGCTGTACAGATGTTTGTGAGCCTTCGTGTGGTTGATGGGAGTTGGACCTCTGCTTGCTC
CAGTCAACCCTACTCACTCAGGTCATCAGCTCATCTCTGCTCACCCAGTCCCTGCTTGCTCCAGTCCAAAGATTTATTTATTATAATACATAAGTAC
ACTGTAGCTGTCTTCAGACGCCAGAAGAGGGCATCAGATCTCACTACGGGTGGTTGTAAGCCACCATGTGGTTGCTGGGATTTGAACTTGAACTCAG
GACCTTCAGAAGAGCAGTCAGTGCTCTTACCCACTGAGCCATTTCGCCAGTCCCTAATACCTGGGTTCTTAACCTGCAAATTAAATGGGTAACTGGC
GACAGTATATATATATATATATTCATTCCAATCTTCCCTGGAGCTTACGAGATTTTTGTCATGAGTTGAGTGTCAACAAAAGTTAATGAAGAAACTG
GATTTATCATTCATTATTCATAGGCTAAACTCACTCAGAGGAGTCACATTTGAGCCGTAAGCCCCCTCCCCACAATGCAAAGAGAAGGGAAGGGTCC
AGCCAGCCCTCACACCCATCCAGCCCCTCGCTGCACTTCCCTGGCTTCCCCTGCCCCAGGCCAGTTTGGATTGGCAGCAGGTGCAGGGGTGGATTTC
TTCCACTCCTGACTGCTACAGAGCAGTGGGGAGACAGGAGTCTGCGTTCTGGCATGGGAATGAAAATTTACAGGAGCTTCGTCGGTAGGGTGAATTC
CAAGTGAGAGGGCTGGGCCAGCCCAAACCCCTACCATCTCAGTCTCCTCTTCCTCCCAGGTATCTGGGAAGGTCCTGTAGAGTCTGAAGACTTCAGC
AGTAGCTGCATCTTTGTTTATTATGCTACCTTCTGCCTCCTCAGGGAGGAGGAGCGCTGGAAGAGTACATGCTGGGTAAATTCTCAGAGGGCGCTGC
AGGTGAGTGGCCTACAGGGGGTCCTGGTGTAACTTTAATTTTTTATTTTTTTAAATCTTATTTTTAATGATTTCTTTTAATGTTTTAACCCGTTTTT
TTGTAACCCACCAGAGGTAGTGGAAAAGAAAGAAAACGGGAGAAATGGACCTATTTAGAAAGGTTTTTTGGAACAACAGATGTCTGTGTTATCTGGA
AATCAGCAGTTCAGTTCACAGGTTAGCAGGCATCGATGGCTTGATCCACTAGCAAACACCTCACAGACACACCAGCAGGCCAGTTCAGTACAGTCGG
GTTAGCAACGGTGGTGACACGACCTAGTAGAGACAGCCAGGCCTCAGCCTCAGCTTCAGTCAGCAAGAACGACACTGGGAGAAGTTCTCAACTGTGC
CTCTCTCAAGGAAAGCCACGATCAGCAAAGACTCAAGACCCACAAGCGGTGTGTAGCTAGCTCTATACGCAAATCTAGCTCTGTCTCCATCACTCCG
TGGCGTCCTATTTATACCCTCCAAACATCACGTGTCCTCCATATGCCTTGTCTTGCCTCAGCACAGGCATCCAATCAGCCCCAGTCCTTAGAAGCAA
CAAACAAACTGCAGCACACCACAAGAGTTTTGGTGTGTTTCTCTTTATGGAGTTCCGACAAAGGCAGTTCAACTACACAGTATAAGGCAGACCAATA
CATGCACGTTGTTAGCAAAAAAATCCTTCATCACGTGACTTTTCACATTCTTGCTTTAGCAGAACATCCTCTCTCCTGTGTCTGCTTCAGCGAAACG
TTCCTTCCTGAGTCTGCCTTAGTTAGCCTTTCACACCTGTGTCCACTTTAACAAACTGTTCCTTCACGTGTTTGCCGAGCAAAACACCATCCGACCG
ACCTTTCAAAGAACCCTTAAGTTTCCACTTCACCCGGGGATTGGGGGGGGGGCAGTGGCAGAGGAACAGGAAGGCTGGCTATTCTCTATATTGGCCC
AACATTCATGAATGAGCTCAGCTAACTTCTTCTCTTCTGTGGGCCTCAGTTTCCTCATCTGAGAAATGGCAGTCTTGAGACAGGGTGGGGCCCGAGG
AAAAGGACTCGGTTCTGGGGAGGAACAGCTTCAGAGTGCAGAGTTACTGTGTATTTACTGTGGGTCTCTGGGCACAGCATCAGTTTTGCCTTACACA
AAATTGATGGGGGTGGTGCACGCAGTGTAGGAGTGGGGGGCACACAGTGCAGGGGCTGGGGGCACACAGTGCAGGGGTGGGGGAATGCAGTGCAGGG
GTGGGGGAATGCAGTGCAGTGCTGGGGGGCATGCAGTGCAGTGCTGGGGGGCATGCAGTGCAGGGGNNNNNNNNNNNNNNNNNNNNNNNNNNNNNNN
NNNNNNNNNNNNNNNNNNNNNNNNNNNNNNNNNNNNNNNNNNNNNNNNNNNNNNNNNNNNNNNNNNNNNNNNNNNNNNNNNNNNNNNNNNNNNNNNN
NNNNNNNNNNNNNNNNNNNNNNNNNNNNNNNNNNNNNNNNNNNNNNNNNNNNNNNNNGGCTGGGGGGCACGCAGTGCAGGGGTGGGGGGAATGCAGT
GCTGGGGGCATGCAGTGCAGGGGTGGGGCTGTTATCTGCTGCTTTGGTGTGTGTGCACCAGTGTGGTCTGCTCCAGGAGAGGAACCGGCAGACTTCT
TTCAGAGAAGCAGTGTTAGGAGATAACTGAAAGGGGAAGTGGTTATGGCGGGGTGCCTCTAAGGAGCCCCCTTTCCTGCCCAGGCCCAAGAGGTTCC
TCTCAGCTCTCCCTGGCAATGTTGCTCAGGCTGCTTGCTGGGACTGAGAGTAGACAAAGGGACTGGAGAGAAGCTGGGAACTCTGGAGGGGATAAGA
CTTGGGTCAAGGGGGGAGGGTATAGGGGTCTTTCGGGATAGCATTTGAAATGTAAATGAAGAAAATATCTAATAAAAAAAAAAGACTTGCTGGGCGT
GGTGGCGCACACCTTTAATCCCAGCACTCGGGAGGCAGAGGCAGGCGGATTTCTGAGTTCGAGGCCAGCCTGGTCTTCAAAGTGAGTTCCAGGACAG
CCAGGGATATACAGAGAAACCCCTGTCTTGAAAAAACAAAACAAAACAAAACAAAACAAAAGACTTGGGTCAAACTGATGGCTTGGAACAAAAAAGT
CCCACTTCCACTGTGACTAGCTGAATGACCATAGACAAACAAACCAACAAAAATTGGCTCCTTGGTGCTGTTGGCTCTCATGGGGCCTGATAACATT
CACCTCATTACTGATTGGAGGCTGCCTTGGGGTAATATCTGTAAGGGCTTCAGGCATCCTGTAGGGTGCCAAGGTGTCTTCCACTCCTTGCTGCAGG
GGACTCTCATCTTCCACAGTGGGAAGACTTTTTTTTTTAAGATTAATTTATTATTACATGTAACTACACTGTAGCTGTCTTCAGACACATCAGAAGA
GGGTGTCAGATCTCATTATGGGTGGTTGTGAGTCACCATGTGGTTGCTGGGATTTGAACTCAGGACCTTCAGGAGAGCAGTCAGTGCCCTTAACTGC
TGATCCACCTCTCCAGCCCAGTGGAAAGACTTCTACCACTGATGGTGCAGAGCCTTATTCAAGATGGGACAACTGTGCAGTAACTGTCCCTGGTGCT
GGGTTGTACAGATCCTGCAACTGAACCAATCTCAAGGGGCATTATGCTGCATCTGAGGCCACTGCCCACATGTATGGCATTGACTGGACCTCAGAAA
AAGGCGTGGGTCACCCCTACTGTGGGATTACACATAATGCTTTGCTAGAGCACTCAATTGTCAGTATCGTTGTCACTTCTTACAGCTTCCATCTCTT
GGCCACCTCACTGCCAACTGCCTCTGCTTCCAGGGCCACTTTGTAACACTTTACAAATCTTTTCTTACTCAGGAGAAAACCTATAGAAAACGGGGCA
GGGACACAAGCTTCAGTTCCATTCAAGGAAGAACTTCTAATCAGGAAGATGAAGGGTTGAACTTCTCAGGGCTTCAGACCCTAGAAGGATACAAGAA
ATGCTAGGGGGCAGTGAGGTGAGAGATTCAACCACCCACTCGCAATCCTCCTGGGCCCCCGAGCCCAAAGTGGATGCATCTGAGGACAGCTTTCTCT
CACCGTTTGTTTGCTGTTTGGTTGGTTGGTTGATTTTGTGAGACAGGGTTTCACTCAGCAGGCAGCCCTGGCTGTCCTAGAAACTCTGTAGACCAGG
TTGGCCTTGAACTCAGAGATTCACATGCCTCTGCCTCCTGAGTGCTGGGCTTAAAGACATGTGCCATCACCACTTGGTTCCCATTTGTTTCTTGTAA
AGTGTGTTTTCTTTTTTTCTTTTTTTTTCATTTTTTATTAGGTATTTAGCTCATTTACATTTCCAATGCTATACCAAAAGTCCCTGATAGTGATGAT
CAGAACATTGTCTCCCTGATTGAAGAGGACACTGGGATTGGGCTCTGCTATAAACCAGACCCCCCCATCCCGAGACCCCCAAATCTCCTGATATTAC
ATCCTGAGCCTCTATGAGTGTAAAGGAGCTCGTGTCTGATCTTCCACAGACGTGACTTTTTCGCCTTTAAGGGACCTCTTTAATAGGTCCCCCACCC
TCTGCCAAAGTGTGCTCTCTCCCACCATTANNNNNNNNNNNNNNNNNNNNTCCCCCTTTTTGGCCCTGGCGTTCCCCTGTACTGGGGCATATAAGGT
TTGCGTGTCCAATGGGCCTCTCTTTCCAGTGATGGCCGACTAGGCCATCTTTTGATACATATGCAGCTAGAGTCAAGAGCTCCGGGGTACTGGTTAG
TTCATAAGGTTGTTCCACCTATAGGGTTGCAGATCCCTTTAGCTCCTTGGATTCTTTCTCTACCTCCTCCATTGGGAGCTAAAGTGTGTTTTCTACC
CAAACCTCTGTAATGGGCCACATTCTCCCTTTCTGTTGCTCGTCTATCCCATTGGTTCAAACCTAGGAAGATATATTTTTTTCCTTCCATGAGACAA
GAAGGCTGTGAAACAGAGGCTTCCTACCGTTTGTTGAAAGGTCAATTTGTCCAAAGCCCCAACATATTATTTTATAAAGTTTTAGTTTTATTTCATG
TGCATCTTTTGCCTGTAATTATATATGTGCACCAAGTATGTGCTGGGCGCCTATGCAGGTCAGGAGAGTGCCAGGAATCCCCTGGGCCTACAGTTAC
AGATGATGGTGAGCCACCATGTGGGTGCTGGGAACCAAACCAGGGCCCTCTGAAAGAGCAGCAAGTGGTCTTTACAGCTGTGCTGTCTCTCATGCCC
AAGCCCTACCATAATAAACAATTATGAAACATGGCCCTAACCTCAGAGTCTCAAAGTCTCATTTCTAAGTTCAGGGCCCTCTAAGGTTTATAGCAAC
TTAGATTCATACTAGGATGTTAAAGCTTCTTGGTGAATTTGAAGCCGGGATAACCTTGTAACCCAAAAAGCGGAGACTTCTGGAGTTCCTTCAAAGG
GTAGATAGGAAGTTTACCGTAGAAGTGCTTTTCAGCTCCATGGTCAAGTTTCGGGTGGACCAATAAGGTCCACAAGGTTTCACTACAAGAGAGGCTC
TGAGGAAAGCGCTTGTCAACATTCTGACCCCTACCAGCAGGAACATTACATGTGCCGCCTACACAATGTTTTGCTCCCCCGTCCTTTCCCCGCCCAG
TGTCCATTCATTTACCAGGTCCCAGCAGGGCGGGGCTGTCCTGTTTTCTATCCCTGGGCTGGGCACACGTCTTACGAGCGCCTGCAGTAAGCAGTCA
ACAGTGTTTGGCCCGAATAGGGGCACAGGCTGTTCCGGAAGTGGACAGTGTCAGAGGTTCTAGCCGGAGAGGAGGGAGGGAGAGCCGCTGGGGAGCC
TCATTGCCCCAGGGCCGAGGGTGGAGCCTTTCCCAGTCGGGAAAGGGCTGGGCCCAGCCTACATGTGAGGGCAGGACAGAGTGACTGCCAGCGCTCC
CTTGAGAAGTCTGGGTGTAGCACGCTGGCGGTTGACTTCCCAGGACTCTTCTGTGACCTGTGAGCCGAGGATTACTGGGTACCCCAGATTCCCAGAA
CCCAGTCCTGGATTGCAGATCTGTAAGGACCGCGAAAGATTGAGCAAAGAAGTCTTTCTGGACTTAAGAGTTCCGGAACAGGACGTCCAGCCCATCT
CCGGATCCCGACTGGATCCACACCTTCAGCCTCGTGCCCTGTCCCGGGTTCCCCGCGCCCGGGGCCCCGCGCTTGAGCGCCCCCGCATGGCGGGGCC
ATGTCCTAGGGCCGGGGTTCTAGAACGGGCGGGCAGCTGCTGGCAGGACCCGCTGGCGGAGGCGCTGAGCCGGGGCCGCTCGTCTCCTGCGGTCACG
GGTCGGGGCTGCGCGCGGAGCCGGCCTCTCAGTGTGGTCTACGTGCTGACCCGGGAGCCGGGGCCCGGGGTGGAGCCCGGGTCGGGAACCGAGGCAG
AGCCGCTGCCGTTGCGATGCCTGCGCGAAGCCTGCGCTCAGCTCCAGGGCACACGGCCACCCCCGCAGCTGCGCAGCCTACCCTTTGCGACGCTGGC
GCTAGGCGACACCGCTGCGCTGGACTCCTTCTACAACGCGGGTGAGCGACTTGGGGCGGGGCTTGAGTCTAGGCGGAGCAAGGGGTGGAGCTTTAGA
ACCCTGACGGGGCGGGTGTGGGTACCAGGTCTAGGGAATTTACGGTAAACTAAAGCCGAACTTGAGACAAGGCAGTAACGACAGGGCATTTAGTGGA
TATTGGATGTGATGGGCTTGAGGCTGGATCTGGGGATTCAGGCCTGGCTCCGGAGTTTAAGTATCTTTCGGTGAGCGTGGTGCCAAGCAGGTGGGGC
GGAGCAGGCGAACTCTAAGGGCGGGGCTGGGGAGGGACGGGGCTGAGGGAGGGGCAGAGCTGCGCTTCCCTGCGTAAGCGGGAGAACTCTTTTTCAG
GATGATCTCTCGTTGGACTTTTGAGGGTGAATCAGGCCTGAGACGGAAGTTCGGTCTATGGCAAGGGGCCATCTCTGCAGGATTGGGGTTGATAAGT
CCTAGCATACTACATCCCACATGGGACTAAAGGGGCGGGAAAGGAAGTACTGAGGCAACTCTTCGGGACTGGATTATAGGAGAAAGGGATTGTATTT
GGAGACTAGGAGTCGAAAGAAAATGGGTGGGGCAGGGGTGGGTCTAGAGGAGACACAGGGAGTCCAAGGGTGAGGTTGGAAGATAGCTATTCCTCTC
TTTCCCACCTACCGGATGCTCCACCTCATCCCTATTTGTTTATCTCCGAGTCAGAGAGCCTTGTATCCTGGACATCTGCTAAATTGTAGCTTAAAAA
TGAAGGCTGACCCGGTCAGACCACAGATAAAGTGGAATCATCTGCGTTGACTCATACAGTCCCTCCCTTGCGGACATTGTCACTTAAAGATGGCTGG
ATACAGTAAGCTACACAAACACACATAAAAGCACGACGTTGTCTTCACACACGATGATGCAGATCACCCTCAGGACCCTGGCTTCAAGATTGGAGAG
ATGGTTCTGAGGTTAAGAGCACTTGCTGCTCGCCCAGAGGACCCGAGGTTCCCAGCATGCACACGGGGTGTGCATGCTCACAACCACCTGTAACTTT
ATCTCCAGAGGATCCTGATGCCGCTTTCTATCATACACTCACACCAACACACACATACATATAAATAAAACAAGAGAGAGAGGAGAGAGAGAGACAG
AGAAAGAGACAGAGAATGGGACTTCTTTTTGCAAAGTTCCTGTCTCCTACATAACCTGGAAGTGCTCAGTGGGATGAAGGTCCCTGGGCATCTCCTG
TAACACCACCAATAAGAGTACTGTGAAAACCCCGGGAAGCTCTCGAGAGCAGCACCGACTTTGGCATGAGGTGCAGGCAAGGCACTTGACGTGACAT
GCATCTCCAGGCTCCTTCGCCACTGAGCTGGGCTTCCACACTCAGGCCTACACTTCTGTGTCCACAGATGTAGTGGTGCTGGAGGTGAGCAGCTCCC
TGGCACAGCCTTCCTTGTTCTACCACCTCGGTGTGCGTGAGAGCTTCAGCATGACCAACAACGTGCTCCTCTGTTCCCAGGCAGAGCTCCCTGATCT
GCAGGCCCTTCGTGTAAGTGGCCAGGGGGCTGGGGGCTGGGAAGACAGGTGCAGGGTTGGGGTGAGGCCACCCCAGAATGCCAGTATCTGATTGTCT
GCCTCCTGCAGGAGGATGTTTTCCAGAAGAACTCGGTGAGCAGAATCTACCCCTCATGCCAACGTTATAACCTCTGACCCCTACTAACCTTCCTAGC
TTCCTCCTTTGTCTCTGACATCAGTGTGACCCTCAGCACCATGTAGCATCCTTTTGTGACGTGCGGCTCTTTTCTTCTATTCCTATCTTCACCAGTA
CTAACCGCCAGTCCGTCTCTAACCCTGTGCTGACCTATGTGTGACCTCCACTAATTGCTGCCTTCTTCCCACCAGGATTGTGTTGGCAGCTACACAC
TGATTCCTTATGTGGTGACAGCCACTGGCCGGGTCTTATGTGGCGATGCAGGCCTCCTGAGGGGCATAGCCGATGGGCTAGTACAGGCTGGGGCGGG
CACTGAAGCCCTCCTCACTCCCCTGGTGGGCCGGCTTGTCCGTCTGTTGGAGGCTACACCCACAGACTCTTGGTAATGGGGCTCAGGGGGAGGCGGT
ACTAGGTAGAGACTGATGAAGGTAAAGTGTGCTGGGGCTGAGGGGCAGGCTCATCTCTCTCTCTCTCTCTCTCTCTCTCTCTCTCTCTCTCTCTCTC
TCTCTCTCTCTCTGGTCTGTGGGCATCAGCGGCTATTTCCGGGAGACCATTCGTCAGGATATCCGGCAGGCTCGGGAGCGATTCAGTGGGCAGCAGC
TGAGGCAGGAGCTGGCTCGCCTGCAGCGGAGGCTGGACAGCGTGGAGCTGCTGAGCCCTGACATTGTCATGAATCTGCTGCTGTCGTACCGCGATGT
CCAGGTGTGTGGCGTTCGGAGAGGCCATGACATAGGATATAACTCCAGCACTCAAGTGCTTGTGTCAGGAGGGGCAGGAGTCTGAGGTCATCCTGTT
TACAAGCAAGTCTAAGGCCAACCTGGGCTTCAAGGAATCTTGTGTGTAAACCTAAGAAAGAGACCATTGTATGACAGACAGATACAAGTGCAGCTCC
TGGCTGAGCCTCACTAGTGGCTTTAAGTAAATTGTCTGAGCCTCAATTTTCTTATTTGTTTCATCATCATTATTATTTTTTAAACATGGTCTCACTG
TGCATTCCTGGCTGGCCTGGAACTCAATATGTAGACCAGGCTGGCCTACATATCCACCTGTTTCTGCCTTCTAAGCCTTGTGCCACCACACCTGGCT
TTATTGTTTTTTTTTTTTAAAGATGCATTTTATTTTTTTAATTGTGTGTATATATGTGTGTCTGAGTTAGGGTTTGTACCTTGTGTGTGCAGTTACC
TGTGGAAGACAGGAGAGAGTGTTGGATCCTTTGGGACTGGAGTTAAAAGAGGTTGTGAACTTCCTGTTGTGAGTTCTGGACCCCAAACTGCAGTCTT
CTGGAAGAGCAGCCTGCACTCTTAACTGCTGCTAGTTATCTCTTCAGCCCATATTTCCTTCTTTTTTGAGGGATGATGTGGTCATTGCCTCACAGGG
CATTGGTGAGGTTAGAAACACCCAATGTGGGGTGCATAGTGGGTTCTCCAGGAAGGTGTGGTCTGTAAATCTGCTTGGCCCGAGGGAGGTGTGCAAA
GTCTTCAGGTTGTGGGTAGTAGAAATTTCCTTCAAACTGACAGTAGTTACCCCTGTCTTAAATCCCAGCACTCAGTAAGCAGAGGCAGGCAGATATC
TGAGAGTTCAAGGGTAGCCTGGTCTACAGGGTGAATTCCAGGACACCCAGGGCTATGTAGAAAAACCTCATCTCAAAAAAACAAGCAGAAAAAATGA
TTTCTGCTGGCAGTGATGGTGCGGGTCTTTAGTCCCAGCACTCGGGAGGCAGTAGCAGGTGGATCTGTGAGCTTGAGGCCAGCCTGGTGTACAGAGA
GAGTTCCAGGGCAGCCAGGGCTACCGATCTTTCCTCGCTGTCAAGGGCTCATCGAGATGCTGCACGCTGTCTCCCACAGGACTACTCGGCCATCATT
GAGCTGGTGGAGACGCTGCAGGCTTTGCCCACCTGTGATGTGGCTGAACAGCACAATGTCTGCTTTCACTACACATTTGCCCTCAACAGGTGGGTAA
TGGGGCACGGCTTGAGTCAGAGTCTTGGAAGTCTCTGTGACCTGCCAAGCAAGAGCACTGCAATCTGGAACCACTGCTCCTCGGGTATCTTGCTAAC
CTGGGTCCTAATGTCACAAGGTTCCTGTTGGTCTGGGCTAAGGATGCATGGTGGGGACAGAGGACGTGGGATCCCCTTGATAGGGTCATAGCTGTCC
AAGGTCGCTACTCCTTAGAGTTGTTTGCAACTAGAAATCCCTTCCATCTGGAGTCACTAACTCTAGAGATCAATGCTTCCCGGGGTTAGTGTCATTT
GAGGCTCATTAATAGTAAGCCCCCAGAAGGGTCCCTTCCGTTTATGGTCTATTGGGTCCCAGGACTGGGTGGGTCAGAGCCATCAGACAGGTCTTCA
GTGTATGTTCCTCCGCCTTAGGAGGAACAGGCCTGGGGACCGGGAGAAAGCCCTGGCTGTCCTGCTGCCATTGGTGAAGTATGAAGGTCCCGTGGCT
CCGGATCTGTACTGCATGTGTGGTCGTATCTACAAGGACATGTTCTTCACTTCTGGCTTCCAAAATGCCGGGCACCTGGAGCAGGCCTATCACTGGT
AATTCACATAAGAGTAAAGAGAGGGCTTAGCGATGGGACTGAAGGGTGGGGTTGCGGGCATCCATTCAGCCTGGCATCCCGTGCCCGACCCGACTCC
AGGTACCGCAAGGCGTTTGATGTGGAGCCCAGCCTGCACTCAGGCATCAATGCAGCTGTTCTCCTCATTGCAGCCGGGCAGCATTTCGAAGACTCTG
AGGAGCTCCGGCTGATTGGTGAGGCCTGCTGTTAGCCCACAGCACCCTGCACAGGCTCCAAAGGGCAAGGAAAGGGCCCCAGGCGGGAAAAAGCGCT
GACTCAAAGTGGGCTTCGAGACTGATCGGTGCCTGAGGTCTGAGGTCTCAGGAGCCTTTGAGTGCCTCTCTTCCCAAGCCCACACTTCCGGTTGTCA
CACTTTATCCCACATCTATTTGTGCCCTAGCTCTCCCCTGTGCTAGGCTCTTAGCGCTGAGATCTTGCCACACCTACCAGATCTACATTCATATCCA
CACTCCTGTGCGTGAGGGCCACAGTGGGACCCACACTTGAGCCTTACTCACTCCGGGACCTACACTGGATTGAGCCCACGCCACCCTCCCCCAGGCA
TGAAGCTGGCCTGCCTGCTAGCCCGCAAAGGCTGTGTGGAGAAGATGCAGTACTACTGGGATGTGGGATTCTACCTGGGAGCCCAGATTCTTGCCAA
CGACCCCATCCAGGTGGTGCTGGCTGCAGAGCAACTGTACAAGCTTAATGCCCCCATTTGGTAGGTGGCCCCTTCTTCAGCCCTGCACCCATGCCCG
TTGGCACCCCTCCCCAAGCCATGACCCCAATACTTTGATGTCACTACGATAGATAGACAGTGCCCGTGTTCCCCTCTGTTCGTGGTATGTGATGCCC
GTATCCTGACTACATGCAGCTGAGTGGCACCAGCCGGCTCCTAGGCTGAGCTGAGGCCAAGGCTGTCTGTGCATTTAGGTACTTGGTCTCCGTGATG
GAGACCTTCCTACTGTACCAGCATTTCAGACCCACACCAGAGCCCTCAGGAGGACCCCCGCTTCGAGCTCACTTCTGGCTCCACTTTCTGCTACAAT
CCTGCCAGCCTTTCAAGATGGCTCCTCCTCAGGAGGACCAGTGCCTGGTAAGGGCAGTGGGGCCTAGGGACCCAGGGGCCCAGGGACAAGCACATTA
TGACCGATCCCTTTCCCCGCTACTGCTTACAGGTACTGGTGCTGGAGATAAACAAGGTCCTGCTGCCTGCCAGGCTTGAGATTCAGGGAACAGACCC
CATGAGCGCAGTGACCCTAAGCTTGCTGGAGCCAGAGACTCAGGTGAGCTCTGAGACCCATTACTCACCGATCCACCTTTCTTTCTCCTATCCTCTC
TAGTCCCAGCGCCTCCACAACCTCCACCCCTTTCTTCTCACAGGAGGATCCTTCCAGCTGGACCTTCCCAGTCACCTCCATCTGTGGGATCAGGTGA
GAGCTGAACCTTCCGGCAAGCTCCTGTGCCACCAAGCCTGGCATTCAGTAGCCTCTCTTCTTCCCTAGCACCTCCAAGCTGGACCAGCGCTGCTGCT
TCCCTGTACGTACTTCCTCCGGCCCAGGACGTCCAGCTGTGCTTTCCCAGTGTGGAGCGCTGCCAGCGGTGCGCTCAACCTTTCTGAGTTGGGGATG
GGACGCCCAGGGGACGGAACGGACCAGGTGCTCCTGGGGGATGGTTCCTGGCTGTTCCCCTTCCAGCTGTTTCCCCCTCTTCAGGTTCTGTGGCCTA
ATTCAGGTCTTGGTGATGAATCCGGATTCCTCCGCGCCCACTGAGGAGGCAGAAGGCGCAAGGGAAGTGCTGGAGGTGAGGCTGCAGAAATGGGGGG
GTTGGAGGAGAGCGAGGGGTGAAGGGTCCCTGCTAAGCGGGTGCTCTGGGTTCCACAGTTTGATTATGAATACTCGGAGACCGGTGAGCGGCTGGTG
CTGGGCAGAGGCACATATGGGGTGGTGTATGCTGGCCGAGACAGGCACACGAGGGTACGAATCGCCATCAAGGAGATGCCAGAGAGAGATAGCAGGT
GGGGTGCATTGGTCGATGAAGGTCTGGGGTCTCGGGAGGGTATATGCAAACAGGGTGTGTGTGTGTGTGTGTGTGTGTGTCTGTCTGTCTGTTGAGG
AAACGTGAGAACTGACTGATTGTGGGCATGGAAAGAGCTCTTTAGTGGCTGGACTAGGGGTGGTGGCCCTTACAGTAGATAAGAGAGGTCTGTGGGC
GGGGTGTTGGATCTGGGGGCATGGTTTCATGGTACAGGACCATGGGAGGTTATCTCTGCTCACATCTGCCCATTGCTCTCTCCTCGACACTCCCAGA
TTCTCTCAGCCTCTGCATGAAGAGATCGCTCTTCACAAACGACTTCGTCATAAGAATATTGTGCGTTATCTGGGCTCAGCCAGCCAGGGCGGCTACC
TCAAGATCTTCATGGAGGAAGTGCCTGGAGGTACCAGCCCTGCGTGGGAGGGGAGTGAAACCTGAGGTGTGGGGCGTGGGAATGGAGCCAGACCAGG
GTGGCAACCCCTGAGGGGAAATGAACTCTAGCGTGCGTGGGTATCACCTAGAATTAGCTGACAGGGCTCACTGGGTGATGGAAGTCTGGGTCATGGG
AATGGGTGTGTTTGGGCTTTGATCAGAGGGATGTAGGTAGAGTAAGCGGACATCAATTATAAACTTGGTTTGTCTCTGCCCAGGCAGCCTGTCCTCC
TTGCTTAGGTCAGTGTGGGGACCCCTAAAGGACAATGAGAGCACTATTAGCTTCTATACACGTCAGATCCTACAAGGACTCAGCTACCTCCATGAGA
ACCGCATCGTTCACAGAGACATCAAGGTCAGCCCTGTGGCTGCTCCGGGTGTGTGGAGACACAGTACCAAACTGAAGCTGACAGTAATGGTGGGAGA
GAGCACACTTTGGCAGAGGGTGGGGGACCTATTAAAGAGGTCCCTTAAAGGCGAAAAAGTCACGTCTGTGGAAGATCAGACACGAGCTCCTTTACAC
TCATAGAGGCTCAGGATGTAATATCAGGAGATTTGGGGGTCTCGGGATGGGGGGGTCTGGTTTATAGCAGAGCCCAATCCCAGTGTCCTCTTCAATC
AGGGAGACAATGTTTTGATCAACACCTTCAGTGGGCTGCTCAAGATTTCTGACTTTGGCACCTCTAAGCGGCTGGCAGGCATCACACCGTGCACGGA
GACTTTCACAGGTAATGGGGGGTGGGGGTGGGGTGAGGGTGTCAAGCTCTTGGAGACTTCTGGGGAATGGAGTTTTTTTTCTTGGCACAGAGTTACA
ATTTTAAAGATTTATTTATTTATTTTATGTATATGAGTACACTGTAGCTGTATAGATGGTTGTGAGCCTTCATGTGGTTGTTGGGAATTGAATTTAG
GACCTCTGCTCTCTCTAGTCGGCCCAGCTTGCTCAGTCCCTGACTGCTCTGGCCCAAAGATTTATTTATTATTATAAATAAGTACATTGTAGCTGTC
TTCAGACACACCAGAAGAGGGTGTCAGATCTCATTAAGGGTGGTTGTGAGCCACCATGTGGTTGCTGGGAATTGGACTCGGGACCTTCGGAAGAGCA
GTCAGTGCTCTTACCCGATGAGCCATCTCACCAGCCCTTGAATTACAGTTTTAATGGTGAATGGAAGGAATCTGGCTGGAGACAGGTGACTGGATCC
AGGAACCGCTGGTAAAATCTATACTCCAAGGTTGGGTAACTAATGAGAAAGACCTCAGCATCGAAAACGGATGCAAGGCCGCGTGTGTTGGGGGTGT
GAGACGGGTTGGTAGAATTTGAAGGGAGGACGATGTAGCGTCACGTACAAGCCAGAACCCTCCTGATGGTTGAACGCTATGCAGCCTAGAATGAAGG
ACGGAAGCTTGGCAGGTGACGGGGCCTAGGTGTGCACATGGCCAGTGGATGATGGGGACTTGATGCGTACCTGGCATTGTTGTTCCTATTTGTGGTC
TAGGGACTCTGCAGTATATGGCCCCGGAAATCATCGACCAGGGCCCGCGAGGATATGGGAAGGCAGCTGACATCTGGTCTCTGGGCTGCACTGTAAT
CGAGATGGCAACAGGTCGACCGCCCTTCCATGAACTAGGGAGCCCTCAGGCTGCGATGTTTCAGGCGAGTCTCTCTGGGGTGTGGCCTACGGAGGGT
GGGCGGAGCCAGATGGGGCCAGTGGGGTTATCTATCCCATCTGCCCCACCTCCGCAGGTGGGCATGTACAAGGTACATCCACCCGTGCCCGGTTCCC
TGTCAGCTGAGGCCCAAGCCTTCCTCCTCCGAACTTTTGAGCCAGATCCCCGCCTCCGAGCCAGTGCCCAAGAGCTGCTGGGAGACCCCTTCCTTCA
GCCAGGGAAGAGGAGCCGCAGCCCGGGCTCTCCTCGGCATACTCCCCGGCCCTCAGGTGCTATGGGGGTGGAGGGGGACAACCTAGTGAAGGGGAGA
GGGGGTGATGAGGCGAAAAGACTAACAGCTTGTTCCTCCCTCAGGCGCCCCTTCCGGTCCTTCCAGTCCTTCAGCTGACTCAGCCACACAGTCTCAG
ACATTCCCAAGGCCCCAGGCACCCTCTCAGCACCCACCCAGCCCCCCAAAGCGCTGCCTTAGTTATGGGGACACCAGTCAGCTCCGGTGAGCGCCTA
GGGTCCTGGAGTGGGTTCTCTTCATCTTTTTTTGCCGTTGTATTAATTTCCTCCAGAAAAAAAAAGCCTCCCTGGGTGGCAAACACCCTGACCACTT
CCAAGGACCGTATCTACTACCTCCTGCCCTCTCCCAGATGCCGGTGGCATTCACTCTGCCAACCCCCAGATGGGCTTAATTTCTATTATCCCCGTGA
AGTAGGCATAAAAGAGCCAAGATTCAAACCCTGCAACATAGGTGGTTGGTTGCATGGTGTTGCCCACCCTCCATCTAATGCCCCTCATTGTGCCCAG
TGTGCCCGAGGAGCCCGCTGCCGAGGAACCCGCGTCCCCAGAAGAGAGTTCAGGCCTGAGTCTGCTGCACCAGGAGAGCAAGCGCCGGGCCATGCTG
GCTGCGGTGCTGGAACAGGAGGTGCCCACACTAGCAGAGAATCTCCTGGAACAGGAACAGGTGGGCGGCCCGCCCCAGCGCCCCCTGGTGGTCGAGC
TGGGATAAGAATTTATAGTGCACCGGCGAGCATCTCTGTTGACTGCGGATGCGAACATCCACGGACGTCCCCTCTTTTTAGGACTCTCGACTCAGCA
AGATTCATGTGGAACTTCTGCTTCGGTGCCTTGGGGCACAAATCCACACTCCTAACCGCCGGCAGCTGGCCCAGGAGCTGCGGACCCTGCAAGCTCA
GCTGCGGGCCCAGAGCCTGGGCCCTGCGCTTTTGAAGGGGCCGCTCTTCGCCTTTCCAGACGCGGTGAGGAAGCTATCTCGAAGTTAGGGCTATGCA
ATAACAGGTCGCGAGCAAGATCTTGATGTTCCAGGATTCTATGATTTCCAGGAAGACGCATGTCCAGTCCTGGCTTCCCTGTCCCACCCTTGACCCC
AAGTCCGCCCACCTCTTTTAGACTGCAGCCGACTTTCTAGGGCTTTGCAACTCAAGCCCCACCTCTGTTTGAGATTCAACTGTCTCAACCGCGCCTT
CCTTCCCTCCCCAGGTGAAGCAGATCCTCCGCAGACGCCAGATCCGCCCACACTGGATGTTCGTGTTGGACTCGCTGCTCAGCCGTGCAGTCCGGGC
GGCGCTGGCGGTGCTGGACGCGGGTAGGTGGGGTTGGATCCCGCCGGCCGGCCGGGGCGGGGTGCGTGGCCCTGGGGGCGTGGCGAACATAAAATTG
GTACTTCGCGGCCCTCCCTTCTCCCTGACCGTCTGGGGTCCTAAACGGGCGCGGCGCCCACCTGGAGCTCAGTCTACTCAAATTGGTAGAGTCGGAG
AAGAAAGCGGTCTTACCGAGGTCAGAAGAGTCGAGTAAAGAGGAGTCCCAGCAGAAACCTCAGGAGAGCCAGGCGCTGCAGAGCCAGCTCCCACCAG
AGCAGGGACCCCCATCGTTGATGGTGGAGTTGGGCCTTTTGCGAGCCGAGACTGACAGGTGAAGCCTTTTGGAATCACTCGGATAACCTGCAGAGGC
TTCAATCTGCAGGCCCTTCCATTCTACCACCCCTACCTTCCCACAGGCTTCGGGACCTTCTGGCTGAGAAGGAACGTGAGTGCCAGGCGCTGGTGCA
ACAGGCCCTGCATCGGGTGCATGCAGAGACCAGGAAGTATGCCCCAGCTTCCGAGACCCCAGGTGAGCCGACTTGACTGGGAAATGGTGAAGGTAAG
GCCACAGAGGACACCTTTGCCCTCCCTCATCACCTGCCTTTTTGACAGCCACTCTCCCAAAGGACCAGAACCTGGTGCGGTGGCTACAGGAACTGAG
TGTAGATCCAGCCACTATCCAAACGGTGAGTAAGTGTGAGCTGGCTCCCACCACCCACCCACCAAAGGCATCTCCTCTGTCTTCCAGCTATTCAAAC
TTTGTCATTGCTGCAAAGATGCTCAATACTGAAAGAGCCCTTAGTATGCACCTCTCCTCTCATTATAGGGATGGGGAAACTCAGGCCACAAGGGGGC
CGCCTGCCTGAGAGTTCTGTTAGAAGCAAGAACCCGAGTTTCTAGTTGAATTTCTGTGCAACTTGATCTTTCTCTGTTTCTGTGGTTCTCGGTTCAT
AACCAGCTCCTGAGTCATAGCTTCACCCTTCAAACCCTGCTCACCTGTGCCACTCAAGATGATCTAGTCTACACCAGAATCAGGTATGTCTTGGGCC
TTCCAGGGGTGAGTCATGTAGCACTTGCTAGCAATTTCAGGACATCCCCTTCCCTATGGGCCTGGCCTGCCTTTGATTCCTCCCTGAAAACCATAGT
GGTTCCTAAAGAGAGAGCATGGGCTGCCTTCTGGCTGAATTACATTGATCCCTGATGTCCCCAGGGGAGGGATGGTATGCCGGATTTGGAGAGCCAT
CTTGGCACAGCGAGCAGGAGCCACATCGGTCACCCCAGTACCCCGGGACGCTGAGTGATGACATCAAAGGACACAGATACGGATGGATGAACAGAGA
AGACACAAACAGCTTTGGACACACCTGTCCTAGAACCCAGGAGCAACTACAGGGACCAGGCCCAACCCCAATGGGTGGAACTAACTAGGGAGGCACC
CAAAGGACACTACATACAATCATAGACTATTAAACAGAACACTTGCTACCATGCTTGTCTTGGCAACTTCAGAAGGGTGTTGGGGGGAGTGAGGAGT
GTCCAAGGAGAAGCCCCTTGAGGTCTCCATGTCTGAGTGACCCTTTTTCATTTCCTGGGCTTTCAAGCTAGTGCCTTACTACCCAGACTTCATACCC
AGTTAAGCAGTCAGTAGCTCTGTAAACAGACTTTATTGATTCCGGCCATGGGTGTGCTTTAGGTGGGGGGTCCACAGAGGGGTTTGACAAGGCTATG
CCCTGGGGACCAGGTTGGTTCTGAGGGGCAGAAGGCCATCCACCCACTCACAGGGCCGCTCCAGGAGTGTCTGCCACAGCTGCTTCTCCTCCGGTGT
GGAATCCATCCAGGGCACCTGAAGCCCATAACTGCTGCCTGGATGTGGGTGAGCCAAAGTGGAAGCTACTGTTACCTTGGAGACCTCGGGTCCCAAG
AGCAACTTTCTGGTCCCAGATTATGCATTGTGCCCAAGCATCCCGAACCTCCCAGCTTGGCTCCCCTCAAGGGCCTGCTCTGCTCACCTGTACCAAG
GCTGAGGCGTGTGCCCCCCAGCTGGCGACTGGCCAGGGCCCCATGGTCCCACAGGGAGAGCTCGGCACAGGCTTGGCGTAGGTCAGCAGGCCCGAAG
CCGTCATAAACCATGGTGTGGTTGAACACAGGGCTGAGACTTCTTCGAACCACTCTTGTGCGTTGGCGGCTGGCCCGACTGTCATCAGGCAGCACTG
AGCTGCGACAGGGTAATAAAGGAGGGCTAGTCTTAGGCAATCACCCTCTGACACTCCCTCCCTGAGCCAGCCAGGCACCATGTCCTGTCCTTTCATA
TGGCCGTGTTCCCTGACCGTTCCCTGGCCCTGGCCTGAGATCAGGTCTCTAGCCCTCTTACACTAATCTTTTCTTAAGGCTTCGTACGTGAAGCTAA
CTGTTCACAGGATTCCAGAGAGAAGTCTCTGAAATGCAATTCTGCTATTTTCTGGCCCAGTAACCTTCAGTATTCCCTGCCCTCCCCTTTAGTTTCC
AAAGCCTCAACCACTCTGTAGAGTAGAATAATATTACTCTGATATAGAGTAATAGAAAGGAAGCCAGGACGGGAGCCCCAACTCAGAGCAGTCTACT
CTGTTTCACTCCTGGAGGGTGCGGTAACAACACCTGAAGCACCCAGAAACACTTTTAGAGGTTCTGTAAAAACTTACTTTGTAAACCACAGAGCTGG
GGTGTAGCTTAGTGGTAGAGCCATATATGTGTGTATGTATATATATGCATGCATGCTTAGGGTGACTGAAGCATTACGGTCAGTTCGCAGCATGTTA
AAAGACAACTACAATCACCAACCATTGACTCACAAGTTCAGAGCCAAGCCCCATAGCTTGTCCCTCCAAGAGTTCCAAGGAGGACCCTTGTGGCCTT
TGCATCATAGTGCGTGCATAGTAGGTGCACAGCCTCTGCAGACTGCAGCCTATGCTGGCTAATGTCAACTTGACACAAACTTGAGCAGTGGTTCTCA
ACCTCCCTAAGGCTGTGGTCCTTTAAGACCCCCAACCATGAAATTATTTCATTGCTTCTTTGTAACTGTAATTTTGCTACTGTTATGACTTGTACTG
TAAATATCTGATGTTTGCCACCCACAGGTTGAGAACCACTGAGCTAGAGTCCTCTGAGAGGAGGGAATAAGCTAAGCAAATGCCTCCATAAGATGGG
TCATGCCGTGGCCAAGCCTGTAGAGCATTTCCTTAAGTACTGATTGAGCAAGGCTAAGCAAGCCTTGGAGAGCAACCCATGAGGAGCCAGGCAGTCA
GCAGCCCTCCTCTGTGGCCTCTGCATCAGCTCCTGCCTTCAGGTCCCTGCCCTGTTTGAGTTGCTGCCCTGGCTTCCTTCAGTGATGGACTACAGCG
TGGAAGTGTAGAACCCTTTCCTCCCCAACCTGCTTTCTGGTCGTGGTGTTTCATCAAAATAATAGAAACCCTAACCACATAGAGCCCCTTAGTTCCC
CAACTCAGATTTTGTTGTTACACAAGGTCTCACTATGTAGCTTGGGCTGACCTGGAACTAGCAATGTAGACCAGGCTGTCCTGGAACTCAGAGACAC
ACCTGCCTTTGCCTCCCCAGTGCTGGGATTAAAAATGCACACCACCACCAGGCAGTGGTGACGTATGCCTTTAATCCTAGCACTCGGGAGGCAGAGG
CAGGTGGATTTCTGAGTTCCAGGCCAGCCTGGTCCACAGAGTGAGTTCCAGGACAGCCAAGGCTACACAGAGAAACCCTGTCTCGAAAACAAACAAA
AAAATAAAACCCAAAAACATGCCACCGGACCTAGCCTAAGCTTTTATTTTGAGACAGGGATCTTGTGTATCCCATGTAGCCTTAATGACCTTGAACT
AATCCTCCTGCCTCCAATCCTAGTTTATGTAGGTTGTTAGAGATCAACCCAGAGCCTCTTGCATGCTAAGCCAGCAACTCCACCAACGGATACCCAG
CCCCAGCCCCCAACTCCAACCCCCTGCCTGGCTTATCACCTCTGCCCTGCTGATCTTGGCTGGGGGGACAGGTGGATCAGAGGTCAAGAGCAGAAGG
GACTAACACCTTAGGCGGCCTCTCACCATTGAATGTAAGTGTCCAGGGATCCTGGTCGCAGTGGTACCAGGCTCTGAGCTTCCTTTACCCAGAAGTG
TAACTCCCCACTCTGAGGCTGTCCTCCTCCTGTGGGGACACTCCAGTTCAGACTACCACCTCACAGAGTGGGTGGGTCTCCCACCTCCATGGGCCAG
TCCAGCTTAAGCTCTCTCTTGGCAGTCACTTACCCTCTGAGCCGGCAGGGACATACTTAAGGGACAGAGACAGCAGTCCACGGCTGGGAAGCTCATC
TGGAGATGGAGGAACCTGAAAAGGCGGGGAGTGGAGAGAAACAGGATTATGTGTGAGAAGGGTGTTGGGGACAGGGCCTCTACTGAGGAGCCCAATG
GCAACGTTCCCCAGAAGAGGCGCCCTGGCTGGCAAGCCTGGCCTAATGGTATCAGTATGAGGCTAAGTGAGGCTCTGCAAACCGGTCCGTTGGGTGT
TTGGTCCAGTGGGCCTGTGGGAATATCAGTGACTGCACACCAGCCCTTACCCGAGGCTGCAGGGGGAGCCAGGTAGCCTCAGAGTCCCAGTTCCACG
TGTCTAGGGGCACTTCTACTTCTCCCAGAAAGATGTTGCGACCCAGACTTTCCCGGTGCCACACGGACAGGCTCAGCACGCGGCCTGGGAGATCAGC
CTGCTGGACAGAGTGCTGGGGACAGGAGGTGAGTTTCAGAGGCATGCCCTGGCATCGCTGTGGCTCACCTGTTAGCTGGAGATGGTCTCCCAGGTTC
CTTTCTAGGATGGGCTCCTGAGGCAGGGTTAACTGGGGTCCTAGCACAAGTTGTGGGGCTTCAGATTGCAAGACCACTAGCTGTCTTGTCATTACTC
TTCTGGGGCCGTCAGGAAAATTAAGGAACCCGGCAGCCCCTGCCACTCACCCCACTGAAAATGGTACCCTGTTTATTTGCAGGGATGACAGAACCCT
TGATGCCTCACCCGCAGAGTCTCGTTGAAGATCGGGTTCAGATTCCGTTTCTTCACTGACGTCTTACGCTTGCTCTGCTTATCCGGGAGGAGGTAGC
TTTTCACGTAGCTGGGCAAGGGATGTGAAGGCTGGAGGTAAGGAAGAGCCCTTCCAGAGCTTTGTCCAGCTCTGGGGTCTTCTCTAGTCACCATCCA
TAACACAGCGTGCCCATGTGGATGTTAATTAACAGGCATCCAATTTAAGACGCTTCCCAATCATATTGTTGTGCCCATTTTGAAGAAGAGAAAACTG
AGGCCGAGGCAGTTAAGTGGTAGGCTGGGTGATGGAGCCCCGCCCCTCAGGCCCCCTGCAGCCCACCTGTGACGTAGGCAGTCACGGATCGGAGCGG
CGTCGCCGGGCAGCGGCCAGGCCCTGGCACTGAATCACCTGTACTCGCAGCTCAGAGGTGCCAGGCTCGTAGTGCAGCGAGAAGAGCACGGAGCCTC
GCACCTGCACCGTGCCTGCCTCCTCTCCGGATAGGGTCATCAGGCTGCCGCTCAGCTGTGGGCGGGGCGGGTGGATGATCAGGGTCCCCATAGGGAA
GCTTCCCACTGTGGGGTTTGCCTGGGCTTTCCCAGCTCCCAGCCCCTCCCTAGCTCTTCACCGTAGAGGAATTGAGGCTGGACACAGAGGAGCTGCT
GCTGAGCATGCGGTCAAGAGAGGGGCCGAGCCCCGGGGCCTCTTCTCCATTCTCCAGGATCTTGGAGGTCGCCTTGGACTGGAGAGGGGAGAAGCGA
CAGGGGCGCCCTCTTACTTCCCTGGACCTTGCAGGGGAGTTGGGGGTAAGGGGTCATTCACCGACGGTTCCCACCCCCAGGGCAGGTACACTCTCAG
TCTGGAATCCGCTCCCGGTCTTGAGAACAGCCAGTGGCTACTCCCGCCTACCTGGGCTGGAGTTGGCTGGGACTCCTGCTCCGCCTTCTGCTCAGGA
TCCAGCTCTGGGTCCGCCTCTGCCACCTGCACACCCCCTTCGCCAGGGGCTGGAATGGGGTACAAGTTGCTGAAAGAGCCCCTCTCCTATGTGTCCC
TAAGCAAACCTGGAGGGTTCACCTGTCAGCTTCAGGCCCCAGGGGTGACCTAGAGTTGTCCCCGAAGGCCAAGTTGGGGTCCCAGGAAGAAGAGGAA
GGTGGACATGATGGTTGTGGGGGCAGTCATTAAAAATGGCCTCTGATCCCCTCAACCTCTTAGGTTCCCCAGCTTACCCTCCAGCTCACATTCCTGG
TCCTGGGGCTCCTCGTCCTGACCTTCGGAAGCCTTTGAGGGTACATATGGTGAGGACAAATCAGGCCCCTGAAGAAAGCAGAGGGTAGAGGTCACGG
TGGGGGTTAATGAGAAAGGGATCAAGGGTTATGCTGGGGTCAGAGGTCAAAGACTCCAGCCTGCTCACCTTGCTTGGTCTGAGTTAGAGTAGGGCTG
CCCTCAGGGCAGGGCTACCTACCAGCTGCAGGACCAGTCAAGCCTGTACTTCACACCCTGGCATCCCAGGCCTGTCTCTCCTGCCGGGCCTGCCTGA
CTCCTAGGCTCAGCTGGTGGGGGCCCCAACATCTGAGTCCCTGGCCTCACCCGCCTCAGTCCAACCCCACCTTTGCTGGCGACACCTCGTGTGTGGT
TGACAATGACCTTGGACTCCTGTTTCTACCTCCTGAGTGCCAGGATCTGAGGTGTTCACCACAATGCCGGGTTTATGTGGTGGCTGGGGACCAAACC
CAGAGCGTCATGCGTGTTAAGCCAGCACTCTATCAACTGAGCTACATCCTTTGTGTTTGTTTTTCAAGGCGGCGTAGGGCGGGGTTCCCTGTGTAGC
CCTGGCCTTCTGAAACTCTAGAGTTGTTAAAAATTGGAGGCTGGCCTCAAACTCACAGAGATCCACCTGTCTCTGCCTCCCAAGTGCTGGGATTAAA
GGGGCAACCTGCCCCACAACCACAGCCCTGCGTGTATCCTTATTCTTTGGTTTTGTTGTTTATTTAGACTTATTTGTTTTATGTAAGTACAGACACA
CCAAAAGAGAGCATCTGACCCCACTACAGATGGTTGTGAGCCACCATGTGGTTGCTGGGAATTGNNNNNNNNNNNNNNNNNNNNNNNNNNNNNNNNN
NNNNNNNNNNNNNNNNNNNNNNNNNNNNNNNNNNNNNNNNNNNNNNNNNNNNNNNNNNNNNNNNNNNNNNNNNNNNNNNNNNNNNNNNNNNNNNNNN
NNNNNNNNNNNNNNNNNNNNNNNNNNNNNNNNNNNNNNNNNNNNNNNNNNNNNNNNNNNNNNNNNNNNNNNNNNNNNNNNNNNNNNNNNNNNNNNNN
NNNNNNNNNNNNNNNNNNNNNNNNNNNNNNNNNNNNNNNNNNNNNNNNNNNNNNNNNNNNNNNNNNNNNNNNNNNNNNNNNNNNNNNNNNNNNNNNN
NNNNNNNNNNNNNNNNNNNNNNNNNNNNNNNNNNNNNNNNNNNNNNNNNNNNNNNNNNNNNNNNNNNNNNNNNNNNNNNNNNNNNNNNNNNNNNNNN
NNNNNNNNNNNNNNNNNNNNNNNNNNNNNNNNNNNNNNNNNNNNNNNNNNNNNNNNNNNNNNNNNNNNNNNNNNNNNNNNNNNNNNNNNNNNNNNNN
NNNNNNNNNNNNNNNNNNNNNNNNNNNNNNNNNNNNNNNNNNNNNNNNNNNNNNNNNNNNNNNNNNNNNNNNNNNNNNNNNNNNNNNNNNNNNNNNN
NNNNNNNNNNNNNNNNNNNNNNNNNNNNNNNNNNNNNNNNNNNNNNNNNNNNNNNNNNNNNNNNNNNNNNNNNNNNNNNNNNNNNNNNNNNNNNNNN
NNNNNNNNNNNNNNNNNNNNNNNNNNNNNNNNNNNNNNNNNNNNNNNNNNNNNNNNNNNNNNNNNNNNNNNNNNNNNNNNNNNNNNNNNNNNNNNNN
NNNNNNNNNNNNNNNNNNNNNNNNNNNNNNNNNNNNNNNNNNNNNNNNNNNNNNNNNNNNNNNNNNNNNNNNNNTTCTTAAGGAATAACTTGGGATT
CTCCAGGTTGAGCAGCATAGTAATCACTGTTCATTAAGTGCTTATTGTGGGCCATGCCTGATAGTTTATTTTGCACATTACATGTCATGTGTGCGTG
GTATGCATGCCTGTATGCTCCCATGTATGTGGTCATACGCATGTGGAGGTCAGAGTATGAACTTGCTCATCTTCAGCTCTCTCCATCCTATATACTG
AGGCAAGGTCTCTCACATAAGCTCTAAGCTCAGTGCTTTGGTGAGTCTAGCTAGCCAGCTTACTCCAGCAATGCCCTAGCACCATTGCCGGAGTGCT
GGGACAGTGAGTGGGCCACCTTACCCCTGGCATTTATGTGGGTGCTGGGGATATGAACTCCATTTCTCAAGCCTATGCAGCAAGTGTTTTACCCACG
GAACCATCTCCCTGACCCCTTAGCTGATGTTTTAGTGGAGAAAGGGGAGGTTCAAGGTCAAAGTAACTGCCCAAGGTTACACAGCTGTTCCCAGACA
CTGCTTGTCACTCTTGAGGTCCTCTGCCCTTCTGCTCCTCTGGGGAGACGAAATATCTTCGTCTTGGAAGTCAAAAGTACTCAAGGATTAGGGGACA
TGCTCATGGCTATATCAGGTTTATATATATCTGGGAGCTGCCAGGAACCGATCAGGGTGACCTATGGGCACACTTAAAGGCTTTGACACTAGGTTCT
AAGGGCTGAGGGAGGGTCCAGAAGGGTAGTACTAAGGACAGGCAGTATCTGTTCACCAAAGTATCCTGTCCCAAGGTGGCGGCCAGAGTAGAAAAAC
CCAAAGACATGGAGGCTAGGGAGGGACCTGTCACAGGTTTGAGAGAAGTGAAGAGCTCTGAGCTAGCCAAGGTCAATGGAGACCAAAAGGTAGCACC
AAGAACCACCCAGACCCAACCACCAGCATCCAAGGACCCCGAATCCCTTCCTTCTATGTGATGGCTGTCCTGTCTCACCTGACCCGCCCTTCCTCCA
GCTGGCGCAGGTGGGCATCTCGTTTGAGGACATCAGAGATGGCCTCCTGTTCCTCCTCTGTCAGGAAGCTGAGGTCCAGCAACCCCTCAACTTCAGA
TCCTGGTCCATGTGCCATGGGGAGGGAGGGCAGGGCCCAAAGCGTCTCCTGAGATGGGTGGCCTCTCTGGGGCATCAGCTGGGGTTGTGCCCCAGCT
GGGCATATGTAGCTTCCTGTGGATAAACCAAGGGCTGATCAGTATCTCTCAAATGCACAGCACACATCCTGAAGCCAGCTGCCGGCTGTCTCCCAAG
CATATACAGGAGTAATAAGGACCAATCAAAGGAAGGCCAGGTCAAGGTGAGGTGGGGCGTAAGTGATGCACTGCAAGAGATGCACATATGCGCATGC
TCCTAAGGATGAATGACAGAGTATTGCAAGACAGTACACGCTGATACACATACCCACTGTTCTACACACATTCCAGATACCTAGACAAAGACAGTTA
CATGCACACACATCCCCATGAAGGAACTGTGCGCACACATACATCATGAAGGGACTGTGCACACATACCCAGAGTCCTATGCCCAAGAGCTGTGCAG
CACAGTAATTCTTAAACCTGCACACAGTATGCCCACTCGAGGACAAGTGTGCACTCACAAGAATAAGTCCCTGCATCTCCACAGATCTCTCTGGATT
TCCTCACACACTGTCTAACCTGCTGCATACTACTAGAAACTAAGGATAGCTCACTCCCCTCAAAGCTAGTATTTTGCACACAACATAACCTGAGTCT
TAATGAAATGCAAAAATATACCTGCATAAACATGTGGATGCATGCACAGCCCTCCCCACCGCTCATGTTTATCCCCTACCTAGCCTGCCTCTGCCCT
TGCCTCCCTCCACCCTGCCCTGGCCCATTTGGCCTTCCTGTCTGAGGCAACCTCCTCCCCAACCCTCACCCCAACTTCCTCCCCCCACTCCCATAGC
ACCCAGTTCCACTGAGGCCACCTGCCTGAGATTCCTCCCCACCAGCCCTTTCTCTAGGCGGAGCTTCTGAGCCCCTTGGGTCTGACCCCCGGGCTCC
CCAACCTCCAGACTTGGCTGGAAGCGTCAGCTGGCAAAACAACTCATGCCCAGGTACCACAGCCACTCGGGAAGGAAAACATTGCCAGCCGAGAGGG
GCATGTGGACATGGCAGGGGACCTGCACTCAGTAGTGGCCCTGGTCTGGGCCCGCTGGGCAGTCTCTCTCTTTCCCAGCCCCTCCTATGCCAGGCCC
CCAGCTGGGGTTGAAAAGGGAGGAGGGCAGCTCAGGGGCAGGTCCTGGCTTGTGCCTGTCTCCTGCCTTGGTCTCCTCCCAGCTGAGTCAGTATCTA
AGCACAGCAAGCAAGCGAGCCTCCTCTCCTACCCCACTTTCCCTCCGGGGGTTTCTGCATCTCCATCGCCATAGCCCTGGGCCCGATGCCTGCTCAC
TGACAGTGACTCTTTCTCTGTACTTGAGGTGCTGGTATCAAGCTAGCTTGGGACTTTTCTATGGCGGGGTGTATGAGCATCGCCGTGTCCTGTTGTC
CTGCTGCATTAGTAGACATGTCTGCAAGCCAGGGTAAAACATAGCATCTGTCCCTGAGTGCTGTGTTGCCTTATGATACTACAGAGTCTTACAGGAG
TGTCGCTGCTGTGGGCAGTGACTTGCTGGGAGCCAGTGCCGTGTGGGTATGTGCATTTCTTCCTGTGTGGTCAGCCAGCCCAGGCTGGCTGGCTTGT
GGTGTGTATGCTAGTACCCCGGGGGGCCACCAGATATGGGAGTGAAGGTGGAAGACATTTGGCAAAATTGCCTGGCTTTGTCTGACAGGTTGGCTTG
GTCTGGGCTGTGGGCCTATACAAGGCCAGGATCTCTCTACCTCAAGTTGTATCTCTTTCAGAGGTAGATTAAGGATCAGGTGTCCCTTGCCCTGTAC
TAACACTGTGGGACAGGGACCCTTTAGTGATAGAAAGTCTGTATGTGTATCTGGGCAGGCCAGAGTCATAATCTTGCTTACACCTCACCCCCACTCC
GCCCAAACTCCTGAGGTACCAGAATGTGGTCAGGACACCAGGTGGCAGTGCCTGTCCCTTAGACCACTGGGTGTGTTACCTGTAAGGGTCCAGTAGG
GACGACAACTTCAAAGGCGACTCCAGCTCTCCAGGAAGACAGTTCAGAGACTAGAAAGGCTGTGGGGACTAAAGCTGACTCGCCCAGCAGCTGCTGC
CCCAGTCCCGAGGAGGTGGAGGAGGAGGAGACACCTCAGCAGGGCCTGGTGCAAAACCG
MOUSE SEQUENCE - mRNA
TCTGGGTGTAGCACGCTGGCGGTTGACTCCCAGGACTCTTCTGTGACCTGTGAGCCGAGGATTACTGGGTACCCCAGATTCCCAGAACCCAGTCCTG
GATTGCAGATCTGTAAGGACCGCGAAAGATTGAGCAAAGAAGTCTTTCTGGACTTAAGAGTTCCGGAACAGGACGTCCAGCCCATCTCCGGATCCCG
ACTGGATCCACACCTTCAGCCTCGTGCCCTGTCCCGGGTTCCCCGCGCCCGGGGCCCCGCGCTTGAGCGCCCCGCATGGCGGGGCCATGTCCTAGGG
CCGGGGTTCTAGAACGGGCGGGCAGCTGCTGGCAGGACCCGCTGGCGGAGGCGCTGAGCCGGGGCCGCTCGTCTCCTGCGGTCACGGGTCGGGGCTG
CGCGCGGAGCCGGCCTCTCAGTGTGGTCTACGTGCTGACCGGGAGCCGGGGCCCGGGGTGGAGCCCGGGTCGGGAACCGAGGCAGAGCCGCTGCCGT
TGCGATGCCTGCGCGAAGCCTGCGCTCAGCTCCAGGCACACGGCCACCCCCGCACGTGCGCAGCCTACCCTTTGCGACGTGGCGCTAGGCGACACCG
CGCTGGACTCCTTCTACAACGCGGATGTAGTGGTGCTGGAGGTGAGCAGCTCCCTGGCACAGCCTTCCTTGTTCTACCACCTCGGCGTGCGTGAGAG
CTTCAGCATGACCAACAACGTGCTCCTCTGTTCCCAGGCAGAGCTCCCTGATCTGCAGGCCCTTCGTGAGGATGTTTTCCAGAAGAACTCGGATTGT
GTTGGCAGCTACACACTGATTCCTTATGTGGTGACAGCCACTGGCCGGGTCTTATGTGGCGATGCAGGCCTCCTGAGGGGCATAGCCGATGGGCTAG
TACAGGCTGGGGCGGGCACTGAAGCCCTCCTCACTCCCCTGGTGGGCCGGCTTGTCCGTCTGTTGGAGGCTACACCCACAGACTCTTGCGGCTATTT
CCGGGASACCATTCGTCAGGATATCCGGCAGGCTCGGGAGCGATTCAGTGGGCAGCAGCTGAGGCAGGAGCTGGCTCGCCTGCAGCGGAGGCTGGAC
AGCGTGGAGCTGCTGAGCCCTGACATTGTCATGAATCTGCTGCTGTCGTACCGCGATGTCCAGGACTACTCGGCCATCATTGAGCTGGTGGAGACGC
TGCAGCTTTTGCCCACCTGTGATGTGGCTGAACAGCACAATGTCTGCTTTCACTACACATTTGCCCTCAACAGGAGGAACAGGCCTGGGGACCGGGA
GAAAGCCCTGGCTGTCCTGCTGCCATTGGTGAAGTATGAAGGTCCCGTGGCTCCGGATCTGTACTGCATGTGTGGTCGTATCTACAAGGACATGTTC
TTCACTTCTGGCTTCCAAAATGCCGGGCACCTGGAGCAGGCCTATCACTGGTACCGCAAGGCGTTTGATGTGGAGCCCAGCCTGCACTCAGGCATCA
ATGCAGCTGTTCTCCTCATTGCAGCCGGGCAGCATTTCGAAGACTCTGAGGAGCTCCGGCTGATTGGCATGAAGCTGGCCTGCCTGCTAGCCCGCAA
AGGCTGTGTAGAGAAGATGCAGTACTACTGGGATGTGGGATTCTACCTGGGAGCCCAGATTCTTGCCAACGACCCCATCCAGGTGGTGCTGGCTGCA
GAGCAACTGTACAAGCTTAATGCCCCCATTTGGTACTTGGTCTCCGTGATGGAGACCTTCCTACTGTACCAGCATTTCAGACCCACACCAGAGCCCT
CAGGAGGACCCCCGCTTCGAGCTCACTTCTGGCTCCACT1TCTGCTACAATCCTGCCAGCCTTTCAAGATGGCTCCTCCTCAGGAGGACCAGTGCCT
GGTACTGGTGCTGGAGATAAACAAGGTCCTGCTGCCTGCCAGGCTTGAGATTCAGGGAACAGACCCCATGAGCGCAGTGACCCTAAGCTTGCTGGAG
CCAGAGACTCAGGAGGATCCTTCCAGCTGGACCTTCCCAGTCACCTCCATCTGTGGGATCAGCACCTCCAAGCTGGACCAGCGCTGCTGCTTCCTGT
ACGCACTTCCTCCGGCCCAGGACGTCCAGCTGTGCTTTCCCAGTGTGGAGCGCTGCCAGCGGTTCTGTGGCCTAATTCAGGTCTTGGTGATGAATCC
AGATTCCTCCGCGCCCACTGAGGAGGCAGAAGGCGCAAGGGAGGTGCTGGAGTTTGATTATGAATACTCGGAGACCGGTGAGCGGCTGGTGCTGGGC
AGAGGCACATATGGGGTGGTGTATGCCGGCCGAGACAGGCACACGAGGGTACGAATCGCCATCAAGGAGATCCCAGAGAGAGATAGCAGATTCTCTC
AGCCTCTGCATGAAGAGATCGCTCTTCACAAACGACTTCGTCATAAGAATATTGTGCGTTATCTGGGCTCAGCCAGCCAGGGCGGCTACCTCAAGAT
CTTCATGGAGGAAGTGCCTGGAGGCAGCCTGTCCTCCTTGCTTAGGTCAGTGTGGGGACCCCTAAAGGACAATGAGAGCAGTATTAGCTTCTATACA
CGTCAGATCCTACAAGGACTCAGCTACCTCCATGAGAACCGCATCGTTCACAGAGACATCAAGGGAGACAATGTTTTGATCAACACCTTCAGTGGGC
TGCTCAAGATTTCTGACTTTGGCACCTCTAAGCGGCTGGCAGGCATCACACCGTGCACGGAGACTTTCACAGGGACTCTGCAGTATATGGCCCCGGA
AATCATCGACCAGGGCCCGCGAGGATATGGGAAGGCAGCTGACATCTGGTCTCTGGGCTGCACTGTAATCGAGATGGCAACAGGTCGACCGCCCTTC
CATGAACTAGGGAGCCCTCAGGCTGCGATGTTTCAGGTGGGCATGTACAAGGTACATCCACCCGTGCCCGGTTCCCTGTCAGCTGAGGCCCAAGCCT
TCCTCCTCCGAACTTTTGAGCCAGATCCCCGCCTCCGAGCCAGTGCCCAAGAGCTGCTGGGAGACCCCTTCCTTCAGCCAGGGAAGAGGAGCCGCAG
CCCGGGCTCTCCTCGGCATACTCCCCGGCCCTCAGGCGCCCCTTCCGGTCCTTCCAGTCCTTCAGCTGACTCAGCCACACAGTCTCAGACATTCCCA
AGGCCCCAGGCACCCTCTCAGCACCCACCCAGCCCCCCAAAGCGCTGCCTTAGTTATGGGGACACCAGTCAGCTCCGTGTGCCCGAGGAGCCCGCTG
CCGAGGAACCCGCGTCCCCAGAAGAGAGTTCAGGCCTGAGTCTGCTGCACCAGGAGAGCAAGCGCCGGCGCATGCTGGCTGCGGTGCTGGAACAGGA
GGTGCCCACACTAGCAGAGAATCTCCTGGAACAGGAACAGGACTCTCGACTCAGCAAGATTCATGTGGAACTTCTGCTTCGTGGCCTTGGGGCACAA
ATCCACACTCCTAACCGCCGGCAGCTGGCCCAGGAGCTGCGGACCCTGCAAGCTCAGCTGCGGGCCCAGAGCCTGGGCCCTGCGCTTTTGAAGGGGC
CGCTCTTCGCCTTTCCAGACGCGGTGAAGCAGATCCTCCGCAGACGCCAGATCCGCCCACACTGGATGTTCGTGTTGGACTCGCTGCTCAGCCGTGC
AGTCCGGGCGGCGCTGGCGGTGCTGGACGCGGAGTCGGAGAAGAAAGCGGTCTTACCGAGGTCAGAAGAGTCGAGTAAAGAGGAGTCCCAGCAGAAA
CCTCAGGAGAGCCAGGCGCTGCAGAGCCAGCTCCCACCAGAGCAGGGACCCCCATCGTTGATGGTGGAGTTGGGCCTTTTGCGAGCCGAGACTGACA
GGCTTCGGGACCTTCTGGCTGAGAAGGAACGTGAGTGCCAGGCGCTGGTGCAACAGGCCCTGCATCGGGTGCATGCAGAGACCAGGAAGTATGCCCC
AGCTTCCGAGACCCCAGCCACTCTCCCAAAGGACCAGAACCTGGTGCGGTGGCTACAGGAACTGAGTGTAGATCCAGCCACTATCCAAACGCTCCTG
AGTCATAGCTTCACCCTTCAAACCCTGCTCACGTGTGCCACTCAAGATGATCTAGTCTACACCAGAATCAGGGGAGGGATGGTATGCCGGATTTGGA
GAGCCATCTTGGCACAGCGAGCAGGAGCCACATCGGTCACCCCAGTACCCCGGGACGCTGAGTGATGACATCAAAGGACACAGATACGGATGGATGA
ACAGAGAAGACACAAACAGCTTTGGACACACCTGTCCTAGAACCCAGGAGCAACTACAGGGACCAGGCCCAACCCCAATGGGTGGAACTAACTAGGC
AGGCACCCAAAGGACACTACATACAATCATAGACTATTAAACAGAACACTTGCTACC
MOUSE SEQUENCE - CODING
GCGGGGCCATGTCCTAGGGCCGGGGTTCTAGAACGGGCGGGCAGCTGCTGGCAGGACCCGCTGGCGGAGGCGCTGAGCCGGGGCCGCTCGTCTCCTG
CGGTCACGGGTCGGGGCTGCGCGCGGAGCCGGCCTCTCAGTGTGGTCTACGTGCTGACCGGGAGCCGGGGCCCGGGGTGGAGCCCGGGTCGGGAACC
GAGGCAGAGCCGCTGCCGTTGCGATGCCTGCGCGAAGCCTGCGCTCAGCTCCAGGCACACGGCCACCCCCGCACGTGCGCAGCCTACCCTTTGCGAC
GTGGCGCTAGGCGACACCGCGCTGGACTCCTTCTACAACGCGGATGTAGTGGTGCTGGAGGTGAGCAGCTCCCTGGCACAGCCTTCCTTGTTCTACC
ACCTCGGCGTGCGTGAGAGCTTCAGCATGACCAACAACGTGCTCCTCTGTTCCCAGGCAGAGCTCCCTGATCTGCAGGCCCTTCGTGAGGATGTTTT
CCAGAAGAACTCGGATTGTGTTGGCAGCTACACACTGATTCCTTATGTGGTGACAGCCACTGGCCGGGTCTTATGTGGCGATGCAGGCCTCCTGAGG
GGCATAGCCGATGGGCTAGTACAGGCTGGGGCGGGCACTGAAGCCCTCCTCACTCCCCTGGTGGGCCGGCTTGTCCGTCTGTTGGAGGCTACACCCA
CAGACTCTTGCGGCTATTTCCGGGAGACCATTCGTCAGGATATCCGGCAGGCTCGGGAGCGATTCAGTGGGCAGCAGCTGAGGCAGGAGCTGGCTCG
CCTGCAGCGGAGGCTGGACAGCGTGGAGCTGCTGAGCCCTGACATTGTCATGAATCTGCTGCTGTCGTACCGCGATGTCCAGGACTACTCGGCCATC
ATTGAGCTGGTGGAGACGCTGCAGCTTTTGCCCACCTGTGATGTGGCTGAACAGCACAATGTCTGCTTTCACTACACATTTGCCCTCAACAGGAGGA
ACAGGCCTGGGGACCGGGAGAAAGCCCTGGCTGTCCTGCTGCCATTGGTGAAGTATGAAGGTCCCGTGGCTCCGGATCTGTACTGCATGTGTGGTCG
TATCTACAAGGACATGTTCTTCACTTCTGGCTTCCAAAATGCCGGGCACCTGGAGCAGGCCTATCACTGGTACCGCAAGGCGTTTGATGTGGAGCCC
AGCCTGCACTCAGGCATCAATGCAGCTGTTCTCCTCATTGCAGCCGGGCAGCATTTCGAAGACTCTGAGGAGCTCCGGCTGATTGGCATGAAGCTGG
CGTGCCTGCTAGCCCGCAAAGGCTGTGTAGAGAAGATGCAGTACTACTGGGATGTGGGATTCTACCTGGGAGCCCAGATTCTTGCCAACGACCCCAT
CCAGGTGGTGCTGGCTGCAGAGCAACTGTACAAGCTTAATGCCCCCATTTGGTACTTGGTCTCCGTGATGGAGACCTTCCTACTGTACCAGCATTTC
AGACCCACACCAGAGCCCTCAGGAGGACCCCCGCTTCGAGCTCACTTCTGGCTCCACTTTCTGCTACAATCCTGCCAGCCTTTCAAGATGGCTCCTC
CTCAGGAGGACCAGTGCCTGGTACTGGTGCTGGAGATAAACAAGGTCCTGCTGCCTGCCAGGCTTGAGATTCAGGGAACAGACCCCATGAGCGCAGT
GACCCTAAGCTTGCTGGAGCCAGAGACTCAGGAGGATCCTTCCAGCTGGACCTTCCCAGTCACCTCCATCTGTGGGATCAGCACCTCCAAGCTGGAC
CAGCGCTGCTGCTTCCTGTACGCACTTCCTCCGGCCCAGGACGTCCAGCTGTGCTTTCCCAGTGTGGAGCGCTGCCAGCGGTTCTGTGGCCTAATTC
AGGTCTTGGTGATGAATCCAGATTCCTCCGCGCCCACTGAGGAGGCAGAAGGCGCAAGGGAGGTGCTGGAGTTTGATTATGAATACTCGGAGACCGG
TGAGCGGCTGGTGCTGGGCAGAGGCACATATGGGGTGGTGTATGCCGGCCGAGACAGGCACACGAGGGTACGAATCGCCATCAAGGAGATCCCAGAG
AGAGATAGCAGATTCTCTCAGCCTCTGCATGAAGAGATCGCTCTTCACAAACGACTTCGTCATAAGAATATTGTGCGTTATCTGGGCTCAGCCAGCC
AGGGCGGCTACCTCAAGATCTTCATGGAGGAAGTGCCTGGAGGCAGCCTGTCCTCCTTGCTTAGGTCAGTGTGGGGACCCCTAAAGGACAATGAGAG
CACTATTAGCTTCTATACACGTCAGATCCTACAAGGACTCAGCTACCTCCATGAGAACCGCATCGTTCACAGAGACATCAAGGGAGACAATGTTTTG
ATCAACACCTTCAGTGGGCTGCTCAAGATTTCTGACTTTGGCACCTCTAAGCGGCTGGCAGGCATCACACCGTGCACGGAGACTTTCACAGGGACTC
TGCAGTATATGGCCCCGGAAATCATCGACCAGGGCCCGCGAGGATATGGGAAGGCAGCTGACATCTGGTCTCTGGGCTGCACTGTAATCGAGATGGC
AACAGGTCGACCGCCCTTCCATGAACTAGGGAGCCCTCAGGCTGCGATGTTTCAGGTGGGCATGTACAAGGTACATCCACCCGTGCCCGGTTCCCTG
TCAGCTGAGGCCCAAGCCTTCCTCCTCCGAACTTTTGAGCCAGATCCCCGCCTCCGAGCCAGTGCCCAAGAGCTGCTGGGAGACCCCTTCCTTCAGC
CAGGGAAGAGGAGCCGCAGCCCGGGCTCTCCTCGGCATACTCCCCGGCCCTCAGGCGCCCCTTCCGGTCCTTCCAGTCCTTCAGCTGACTCAGCCAC
ACAGTCTCAGACATTCCCAAGGCCCCAGGCACCCTCTCAGCACCCACCCAGCCCCCCAAAGCGCTGCCTTAGTTATGGGGACACCAGTCAGCTCCGT
GTGCCCGAGGAGCCCGCTGCCGAGGAACCCGCGTCCCCAGAAGAGAGTTCAGGCCTGAGTCTGCTGCACCAGGAGAGCAAGCGCCGGCGCATGCTGG
CTGCGGTGCTGGAACAGGAGGTGCCCACAGTAGCAGAGAATCTCCTGGAACAGGAACAGGACTCTCGACTCAGCAAGATTCATGTGGAACTTCTGCT
TCGTGGCCTTGGGGCACAAATCCACACTCCTAACCGCCGGCAGCTGGCCCAGGAGCTGCGGACCCTGCAAGCTCAGCTGCGGGCCCAGAGCCTGGGC
CCTGCGCTTTTGAAGGGGCCGCTCTTCGCCTTTCCAGACGCGGTGAAGCAGATCCTCCGCAGACGCCAGATCCGCCCACACTGGATGTTCGTGTTGG
ACTCGCTGCTCAGCCGTGCAGTCCGGGCGGCGCTGGCGGTGCTGGACGCGGAGTCGGAGAAGAAAGCGGTCTTACCGAGGTCAGAAGAGTCGAGTAA
AGAGGAGTCCCAGCAGAAACCTCAGGAGAGCCAGGCGCTGCAGAGCCAGCTCCCACCAGAGCAGGGACCCCCATCGTTGATGGTGGAGTTGGGCCTT
TTGCGAGCCGAGACTGACAGGCTTCGGGACCTTCTGGCTGAGAAGGAACGTGAGTGCCAGGCGCTGGTGCAACAGGCCCTGCATCGGGTGCATGCAG
AGACCAGGAAGTATGCCCCAGCTTCCGAGACCCCAGCCACTCTCCCAAAGGACCAGAACCTGGTGCGGTGGCTACAGGAACTGAGTGTAGATCCAGC
CACTATCCAAACGCTCCTGAGTCATAGCTTCACCCTTCAAACCCTGCTCACCTGTGCCACTCAAGATGATCTAGTCTACACCAGAATCAGGGGAGGG
ATGGTATGCCGGATTTGGAGAGCCATCTTGGCACAGCGAGCAGGAGCCACATCGGTCACCCCAGTACCCCGGGACGCTGAGTGA
HUMAN SEQUENCE - GENOMIC
ACCACCAGGCAAGATGGGCCCCAAGGGTGAGCCAGGTGAGTAAGTGGGGCTGGAGGCCTCCCCGCTTTCTTTGCCTCTGTCCCTGGACTCTAGGGTG
GGATGTCTGCTTGGCTGCTGTGCCTATGATGGCTCTCTCACAGGGGAATGGATGGCTGGGAGGAGTGGGAAGGATTAGGAGAAGGGCCTGGCTACCC
TATGATGGCCCTCCTATTGGGGATGGAGGGCTGGGAGGAGTGGGGAGGATTAGGAGAAGGGCCTGGGTACCCTATGAAGGCCCTCCTACAGGGTTTG
GAAGGCTGGGAGGAGTGGAGAGGATTAGGAGAAGGGCCTGGGTACCCTATGATGGCCCTCCTACAGGGTATGGAAGGCTGGGAGGAGTGGGAAGGAT
TCGGAAAAGGGCCTGGGTACCGGCTCCACTGGTGGCTCAGCGCTGGGGTGCTGAGACATCAGAGCCAACACTCATCCGTTCTCTGGGGCAGGAGATC
CAGTGAACCTGCTCCGGTGCCAGGAAGGTGAGGCAGCCCTTGCAGGAGCCAGGAAGTTGGGATCACATGGTGTTGGGTGTTGGCAGACCCCCAAGTG
TGGCCAAGATCCTCCCCACAGCCTCCTCAGAACCCTTCTTCAGGGACCTGAAGGAGCCAAGAGGGTCCCTAGGGTCCCACACTTGTTCCAGTGCCTG
GGGGTGGGGGTCAGGGAATAACCTGGGCACCACCCCAGTCCATCTCCCCTTTCCCAGGCCCCAGAAACTGCCGGGAGCTGTTGAGCCAGGGCGCCAC
CTTGAGCGGCTGGTACCATCTGTGCCTACCTGAGGGCAGGGCCCTCCCAGTCTTTTGTGACATGGACACCGAGGGGGGCGGCTGGCTGGTGAGTGTC
TGAGAAATGGGCTAACAGGCCAGGCCCACTGGTCACTTCTCCCCCTTGGCCCCTAGGGGAGCCAGAACCCACCAGAGCAAGGCATTTCCTAGAGGAA
TTCACTGACAAATGTTTAGTGAGCCCCCAATGGGACCTGAAGAAGTATGAGGGCTTCACAGAGGAGGTGCCATTTGAAAAGACCTTAAGTTGAGTGC
AGTAGCTCACGCCTGTAATCCCAGCTACTTGGGAGGCTGAGGCAAGAGAATTGCCTGAACCCAGGAGGTGGAGGTTGCAGTGAGCCGAGTTCTTGCC
ATTGCACTCCAGCCTGGGTGAAAAGAGTGAAACTCTGTCTCAAAAAAAAAAAAAAAAAAAAAAAAAATAGGGTAGGGAGGGGCATTCCAGCTAGAAG
TAAAGATAAACTCAGGGAGGCAGCAGAGTAAAAGGTTTGCAGGGAACGCGTGAGTGAGCTGAGAGCAGGCGTGGGTGTCGGCTAAAGTCTGCCGGCA
CTGACGGAACATGGATTGAGGACCTCTGTAAAGGCCAGTTCATGGAAGGCACTAAATGATCAACTTAAGAAGTGTGCAGCGCGCCCAGACGCGGTGG
TTGGCTGGACGTGGTGGCTCACGCCTATGATCCCAGCACTTTGGGAGGCCAAGGCGGGCAGATCACCTGAGGTCAAGAGTTCGAGATCAGCCTGGCC
AACATGGTGAAACCCCATCTTTACTAAAAATATAAAAATTAGCCAGGCGTGATGGTGGGCGCCTGTAATCCAAGTTATTCAGGAGGCTGAGCTGGGA
GAATTGCTTGAACCCCGGAGGTGGTGGTTGCAGTGAGCCAAGATTGAGTCACTGCACTCCAGCCTGGGCAACGGAGTGAGACTCTGTCTTAAAAAAA
AAAAAAAAAAAGAAGAGTGTGCAGGGCAATGGGTAGCCCCAGGAGAGTTTTAAGCAGGGGAGGGGCCAAGTAGAACTTCTGTTTTAAAAAGATGATT
CGGGCTACACCATGAAAGATGCACTGCATTGGGGGACCAGTGGAGGCAGGGACATGGTTTAGGAAGACAGCAAGGAGCCAGGCAGTAAAGACAGTGG
AGCAGGCCTGACACAGTAGCTCACACCTGTAATCCCAGCACCTTTTGGGAGGCCGAGGTGGGTGGATTGCCTGAGCTCAGGAGTTCAAGACCAGCCT
GGGCAACATGGCAAAACCCCATCTCTACTAAAAATACAAAAAATTAGCTGGGCGTGGTGGCAGGTGCCTGTAATCCCAGCTATGCAGAAAGCTAAGG
ATAAATAAATAAAATAAGACAGTGGAGCAATGGAAATAGAAGTACTTAGGTTGACAACTCTATAGGACCTCGGGCCTACTTGGCTTGGAGGGGGAGG
TGGAAGACATCAGGGTAAGGCCAGGGGTCCAGCTTGGGCTGTGGGAGTGGCCTCTCTAATGTAAAATATCTTGGTTTTTTTGTTTGTTTGTTTGTTT
TGAGACGGAGTCTTGCTCTGCTGCCCAGGCTGGAGTGCAGTGGTGTGATCTCGGCTCACTGCAACCTCCACCTCCCAGGTTCAAGCAGTTCTTGTGC
CTCAGCCTCCTGAGTAGCTGGAACTACAGGTGTGAGCCACCACACCCGGCTAATATTTGTATTTTTAGTAGAGACGGGATTTCACCATGTTGGCCAG
GCTGGTTTCAAACTCCTGACCTCAAGTGATCCACCCGCCTCGGCCTCCCAAAGTGCTGGAATTACAGGCATGAGCCACCAAGCGTGGCCAAATATCT
TGGTTCTTATAGTAAATGAAATTGGGTTATTTTGACTGACACCCAGCAGCGCTGGCCATCTCCTGTGGGTGGGGACAGTGTTTTGTCAATTCAGTCT
TCCCAGGGCTTGCAAGGCTGTGGCATGAAGTTGAGTGTCAGTAAAAGTTAACAAGGGAATGTAGAGTTGATAGAAATATTCAAAGCTAACTTGAAGG
ATCCCCATTTTATCAACAGGCCCCAATCCAAAGAGAGAGTGGGTATCCACCCACCCCTCACAGTTCCTGCACCCTCAGCTGCCAGTGCCCAGCCTGG
AGTAATAGCTGCTGTGCCCCCCCTCCCCCAGGTGTTTCAGAGGCGCCAGGATGGTTCTGTGGATTTCTTCCGCTCTTGGTCCTCCTACAGAGCAGGT
TTTGGGAACCAAGAGTCTGAATTCTGGCTGGGAAATGAGAATTTGCACCAGCTTACTCTCCAGGGTGAGTTCCCAGCAGGGTCCTGGAGTCTGGGGG
TTACTGTCTGCCATCCTGAATCCCTGCCCCACCCCCAAGAACTGAGGATTCCTCCATCCCTGCCTCCCCTTCTTTCCAGGTAACTGGGAGCTGCGGG
TAGAGCTGGAAGACTTTAATGGTAACCGTACTTTCGCCCACTATGCGACCTTCCGCCTCCTCGGTGAGGTAGACCACTACCAGCTGGCACTGGGCAA
GTTCTCAGAGGGCACTGCAGGTGAGTGAGCCTAAGGGGAGCAGAGGAAGGAGGCTGGATCCTTTCCCAGTGCTGCCACTGCCCCCATGAATGACCCA
GGGCAATCCTGTCTCCTCTGTGGGCCTTAGTTTCCGCATCTGAGAAATGGCAATCATGAAACAGGATGGTGCAACAGTGAAGAATTTGGGATCTGGA
GGCAAACAGACCTGAGTTTGAATCCATCTCTGCCATTTAGTACTTATGTGACCTTGGGCAAGTCCTACCCCTCCACTGAGCCTCAGTTTCCTCCTCT
ATAAAATGGGCAGGGAGGCCGGGCACGGTGGCTCATGCCTGTAACCCTAGCACTCTGGGAGGCCGAGGCGGGCAGATAACTTGAGGTCAGGAGTTCA
AACCCAACCTGGCCAACATGGTGAAACCCCGTCTCTACTAAAAATACAAAAAAATTAGCCGGGCGTGGTGGAGGGTGCCTGTAATCCCAGCTACTCG
GGAGGCTGAGGCAGGAGAATCACTTAAATCTGGGAGGCAGAGGTTGCAGCGAGCCAAGAGAGTGTCACTGCACTCTAGCCTGGGCGACAGAGCGAGA
CTCCATCTCAGAAAAAAAAAAAAGGCGGGGGGAGCGCAGGGAGGCAAGGAGGAAGTTTTGGGTGCCGCCTGAGGCTCTGTTGAGTGTTAGTGTTCTC
TGCTTTGGAAGAGGAACCACGGAAGTCTTCTTTCAGAGAAACAGTGACTATTGGGGAGAGATTTAAAAGAGGGAAGTGGTTATGAGGGAGTGCCTCA
GGGAACCACCTTTCCTGGCCAGGCACCTAAGAGGTTCCTCCCAGCTTTTCCTAGCAGAGTTGCTCAGACTGGATGGGAGCTGAGAGAAGACAAAGGA
GCTAGAGGGGGGCCGGGGATTCTGGAGGGGGTAAGACAGGGGGAAAAGCTGGGAGCTTTGGAGCCAGACAGTCCCGAGTTCAAGTCCTGCCGCTGCT
TCAACCAGCCGAGTAACCCTGCGCAAACAACCTGGCCCCTTGGTGTTGCTCGTGGGGCCTGATAAAATTCAACTCTTAGTTGCTCTGAGACTCCCAT
GGCATTATATCTCCAAAGGTGCCAGGCATGGTGCTGGGCACCAAGGTGCTTTCCATCCCTTCCCTGCTAGGGGATTCCCTGAGCCTCCACAGTGGGA
GGCCCTTTACCACCTATGACGCTGACCACGATTCAAGCAACAGCAACTGTGCAGTGATTGTCCACGGTGCCTGGTGGTATGCATCCTGTTACCGATC
AAATCTCAATGGTCGCTATGCAGTGTCTGAGGCTGCCGCCCACAAATATGGCATTGACTGGGCCTCAGGCCGTGGTGTGGGCCACCCCTACCGCAGG
GTTCGGATGATGCTTCGATAGGGCACTCTGGCAGCCAGTGCCCTTATCTCTCCTGTACAGCTTCCGGATCGTCAGCCACCTTGCCTTTGCCAACCAC
CTCTGCTTGCCTGTCCACATTTAAAAATAAAATCATTTTAGCCCTTTCAAGACTCTTCCAGTTACTGGGAAAAAACCCTAGAGGGCAGAGCAGGGAC
ACAAGTTTCAGCTCCATTCAGGGAAGAATTTCCTTCCAGTCAGGAAGATGGAAAGGACAGCCTCTAAAGTAGTGAGGCTTCTGTCTCTGGAGGTGTG
CAAGACAAGGCCAGAGGGGCATATAGTGGAAGGACTGGAGGAGATTCAAGCATCCATTGACAATTTCCTGAGGCTCTCTGGGTCCTGCAAGTGGATG
GCTTTGTGGCAGGAATTGCACAATTGCACAGCTTTTTTGTTTGTTTGTTTGTTTGTTTGTTTTTGAGACGCAGTCTCGCTCTGTCGCCCAGGCTGGA
GTGCAGTGGCACCATCCTGGCTCACTGCAAGCTCTGCCTCCCAGGTTCACGCCATTCTCCTGCCTCAGCCTCCCGAGTAGCTGGAACTACAGGCACC
CGTTACCACGCCCGGCGAATTTTTTGTATTTTTAGTAGAGACGGGGTTTCATCATGTTAGCCAGGATGGTCTCAATCTCCTGACCTCATGATCTGCC
CTCCTCGGCCTCCCAAAGTGCTGGGATTACAGGTGTGAGCCACTGCGCCCGGCCGCTTTTTTTTTTTTTTTTTTTTTGAAATGGAGTCTTGCTCTGT
CGCCCTGCCCAGGCTGGAGTGCAATGNNNNNNNNNNNNNNNNNNNNNNNNNNNNNNNNNNNNNNNNNNNNNNNNNNNNNNNNNNNNNNNNNNNNNNN
NNNNNNNNNNNNNNNNNNNNNNNNNNNNNNNNNNNNNNNNNNNNNNNNNNNNNNNNNNNNNNNNNNNNNNNNNNNNNNNNNNNNNNNNNNNNNNNNN
NNNNNNNNNNNNNNNNNNNNNNNNNNNNNNNNNNNNNNNNNNNNNNNNNNNNNNNNNNNNNNNNNNNNNNNNNNNNNNNNNNNNNNNNNNNNNNNNN
NNNNNNNNNNNNNNNNNNNNNNNNNNNNNNNNNNNNNNNNNNNNNNNNNNNNNNNNNNNNNNNNNNNNNNNNNNNNNNNNNNNNNNNNNNNNNNNNN
NNNNNNNNNNNNNNNNNNNNNNNNNNNNNNNNNNNNNNNNNNNNNNNNNNNNNNNNNNNNNNNNNNNNNNNNNNNNNNNNNNNNNNNNNNNNNNNNN
NNNNNNNNNNNNNNNNNNNNNNNNNNNNNNNNNNNNNNNNNNNNNNNNNNNNNNNNNNNNNNNNNNNNNNNNNNNNNNNNNNNNNNNNNNNNNNNNN
NNNNNNNNNNNNNNNNNNNNNNNNNNNNNNNNNNNNNNNNNNNNNNNNNNNNNNNNNNNNNNNNNNNNNNNNNNNNNNNNNNNNNNNNNNNNNNNNN
NNNNNNNNNNNNNNNNNNNNNNNNNNNNNNNNNNNNNNNNNNNNNNNNNNNNNNNNNNNNNNNNNNNNNNNNNNNNNNNNNNNNNNNNNNNNNNNNN
NNNNNNNNNNNNNNNNNNNNNNNNNNNNNNNNNNNNNNNNNNNNNNNNNNNNNNNNNNNNNNNNNNNNNNNNNNNNNNNNNNNNNNNNNNNNNNNNN
NNNNNNNNNNNNNNNNNNNNNNNNNNNNNNNNNNNNNNNNNNNNNNNNNNNNNNNNNNNNNNNNNNNNNNNNNNNNNNNNNNNNNNNNNNNNNNNNN
NNNNNNNNNNNNNNNNNNNNNNNNNNNNNNNNNNNNNNNNNNNNNNNNNNNNNNNNNNNNNNNNNNNNNNNNNNNNNNNNNNNNNNNNNNNNNNNNN
NNNNNNNNNNNNNNNNNNNNNNNNNNNNNNNNNNNNNNNNNNNNNNNNNNNNNNNNNNNNNNNNNNNNNNNNNNNNNNNNNNNNNNNNNNNNNNNNN
NNNNNNNNNNNNNNNNNNNNNNNNNNNNNNNNNNNNNNNNNNNNNNNNNNNNNNNNNNNNNNNNNNNNNNNNNNNNNNNNNNNNNNNNNNNNNNNNN
NNNNNNNNNNNNNNNNNNNNNNNNNNNNNNNNNNNNNNNNNNNNNNNNNNNNNNNNNNNNNNNNNNNNNNNNNNNNNNNNNNNNNNNNNNNNNNNNN
NNNNNNNNNNNNNNNNNNNNNNNNNNNNNNNNNNNNNNNNNNNNNNNNNNNNNNNNNNNNNNNNNNNNNNNNNNNNNNNNNNNNNNNNNNNNNNNNN
NNNNNNNNNNNNNNNNNNNNNNNNNNNNNNNNNNNNNNNNNNNNNNNNNNNNNNNNNNNNNNNNNNNNNNNNNNNNNNNNNNNNNNNNNNNNNNNNN
NNNNNNNNNNNNNNNNNNNNNNNNNNNNNNNNNNNNNNNNNNNNNNNNNNNNNNNNNNNNNNNNNNNNNNNNNNNNNNNNNNNNNNNNNNNNNNNNN
NNNNNNNNNNNNNNNNNNNNNNNNNNNNNNNNNNNNNNNNNNNNNNNNNNNNNNNNNNNNNNNNNNNNNNNNNNNNNNNNNNNNNNNNNNNNNNNNN
NNNNNNNNNNNNNNNNNNNNNNNNNNNNNNNNNNNNNNNNNNNNNNNNNNNNNNNNNNNNNNNNNNNNNNNNNNNNNNNNNNNNNNNNNNNNNNNNN
NNNNNNNNNNNNNNNNNNNNNNNNNNNNNNNNNNNNNNNNNNNNNNNNNNNNNNNNNNNNNNNNNNNNNNNNNNNNNNNNNNNNNNNNNNNNNNNNN
NNNNNNNNNNNNNNNNNNNNNNNNNNNNNNNNNNNNNNNNNNNNNNNNNNNNNNNNNNNNNNNNNNNNNNNNNNNNNNNNNNNNNNNNNNNNNNNNN
NNNNNNNNNNNNNNNNNNNNNNNNNNNNNNNNNNNNNNNNNNNNNNNNNNNNNNNNNNNNNNNNNNNNNNNNNNNNNNNNNNNNNNNNNNNNNNNNN
NNNNNNNNNNNNNNNNNNNNNNNNNNNNNNNNNNNNNNNNNNNNNNNNNNNNNNNNNNNNNNNNNNNNNNNNNNNNNNNNNNNNNNNNNNNNNNNNN
NNNNNCCCCGCAGCTGCGCAGCCTGCCCTTCGGGACGCTGGAGCTAGGCGACACCGCGGCTCTGGATGCCTTCTACAACGCGGGTGAGAGCGCTGGG
GGCGGGGCCGGATCCGGGCGGGACTCAGGGTCCTGGGAGGGGACCAAGCCGGGCTCGAAGGCTCAAGGGAGGGGCCGAGAGGGGTACCGGGTCTAGG
GGACTTAAAGTGAGCTAAAGCTGAAGGGCTTGGGACAGGGCCCGTGAAAAAAGTGGGATTTAGGGGATCTGGGGCGCGGCCGGGCTCGGGACGAGAC
AGGGATCCGGGCGCGGCTCTAGGGCTCGAGGTTGGGGCTTAGGCACCCTTCAGTCGGAGCGGTGCCCAGCCAGCGGGGCAAGGATGGGGAGGGGCTT
TGGAACTCTGGGGCGGGGCGGGGCGCGGCGCGGGGCTGTGGTGTCTCAGGGGTGGGGTTGGAGAACTCAGCCTCACCCTCAGGAGAATGTCACGCGG
ATCTCTTGAGGACAATTACTGGGAGAGGAGCTTGGACTTAGGGAAAGGGGCCGGGAGGCTGGAGTTCAGGAGTCCTAGCATACTATTTCCAAGGATC
GGGCTAGGAGAGGCAAAAAGAGAAGCGAAGGGGCCCGACGGGACTGGATACTGGGTGAGGGAGCTTAGGTTAAGTGGCCTCAGCGGCCCAGAAAGAA
TGGGCGGGGAAGGGGCGGGGAAGTGGGCGGGAAAGGATGGCTCAGGGGCGGGGCCAGAAGGAGGCTATTCCCCCGCGAGTCAGTCCTCCCTCCAGCC
AGCCCGGATGCTCGGCCCCCATACTTACTTGCTTATGCTAGAGTCCAGTAGCTGTGCTTCCTGGATGTCCATGAAATCGTAGCCTAAAATGAAGGCT
GACCCGACCACTCGGACACAAAGATACAATTATCGACAGACACAAATCGCATACATGTTGACTCATGCAGGCCCTAGCAGACGCTGTCACACACACA
GATACAGTCAGACATAGTAAGCTATACATGTCACAGATATACACATACATACATTTAGGCACAGCGTTGTCTATGCACACTGATGGTAGCCCCTTTC
AAGAGCCTGTGCTGAAGACCAAAGGGAGGGGACTTCTATGTTTGCGCAACTCGCACCTCCTAAATGGCCCGTAACAGACTCAACTGGTCCACAGCCT
CCCTTGCCCCATGCCAGGTGCTCACAGGCTCTGAACCGTGGCCTGAGGGTCCCAACCCAGTGAGCCCAACTCCTCTCCTGCAACACTACAGAGATCA
GTTCTGTGAAAGTGCCAGGGGAACCCTAAAAAGGGCCGACTGAAGCCCAAAGCAGAACCAGACCCTACTGGAGTCCCACAGCAAGGCAGGTCAAGCC
AGGATGGACCCCGGCTCCTTCCCCATCAAGCTGGGCTTCAGGGATCAGCGCCACCCCCTCTGTGCCTGCAGATGTGGTGGTGCTGGAGGTGAGCAGC
TCGCTGGTACAGCCCTCCCTGTTCTACCACCTTGGTGTGCGTGAGAGCTTCAGCATGACCAACAATGTGCTCCTCTGCTCCCAGGCCGACCTCCCTG
ACCTGCAGGCCCTGCGGGTAGGTGGCCTGGGGCTGGTGGAGGCAGGCACAGGGCTGGGGTAAGGCCTACACAGAACACCAGTATCTGACTGTCTGCC
TCCTGCAGGAGGATGTTTTCCAGAAGAACTCGGTGAGCAGAATCCACCTCTCACTCAAAAGTGCCCTTTGACTTCCGCTATGACCTCTGACCTCCAC
TAATCCCCCTGGCCTCCTCAGTCACCTAACCCCCCACTGACATCCCAAGTATTCCTCTGTTTCCTGTTGCCTCCTCTCATGACGGGTGCCCCTTTCC
TGCGATTCCAATTCCCACTGATGCTGACCTTTGATGCTGTCACTCCCCTTGTCTAGCCCTGTGCTGACCTCTGACCTCACTGATTCCTGCCTCCCTC
CCACCAGGATTGCGTTGGCAGCTACACACTGATCCCCTATGTGGTGACGGCCACTGGTCGGGTGCTGTGTGGTGATGCAGGCCTTCTGCGGGGCCTG
GCTGATGGGCTGGTACAGGCTGGAGTGGGGACCGAGGCCCTGCTCACTCCCCTGGTGGGCCGGCTTGCCCGCCTGCTGGAGGCCACACCCACAGACT
CTTGGTAATGAAGGCCCCCAGGGAGGGTGCTCCAGGAGGGGGCTGGTGAGGGTACGGTGGGCTGGGGCTGAGGTACAGGCCCCACCATTCTCTCTCC
CTGCCTCCCCTACCCTGGGCATCAGTGGCTATTTCCGGGAGACCATTCGGCGGGACATCCGGCAGGCGCGGGAGCGGTTCAGTGGGCCACAGCTGCG
GCAGGAGCTGGCTCGCCTGCAGCGGAGACTGGACAGCGTGGAGCTGCTGAGCCCCGACATCATCATGAACTTGCTGGTCTCCTACCGCGATGTGCAG
GTGCGTGGTGTTCAGAGAGGCAGTAGGGCAGCTGGCATTTGAGGTCAGGCAAACCCAAGTTCAGTTCCTGGCTGGGCCACTTGCTCACTGGTGGCTT
TGGGCAAATTATCAAATGTCTCTGAGTGTTGGCCTCCTTATTTGTTAGAGAGGATGAGCATGTCGCTGCCTCCTGGGGCAGTTGTGGGGTTGGGAAC
GCCCAGCATGGGGCATACAGTAGGTTCTCCCTGTGAGGTGTGTCCGCTGGGCCTGAGGGAGGCGTGCAGAAGATGGTGGCTGGGTGGGATGTCAGGA
GTGGGACAGGACCCTGGCTCAAGGTTCCTTGGGGCCTGGAGGCCCATGATGCCAGTGCTTGCCGTTCCGTGATGCAGGACTACTCGGCCATCATTGA
GCTGGTGGAGACGCTGCAGGCCTTGCCCACCTGTGATGTGGCCGAGCAGCATAATGTCTGCTTCCACTACACTTTTGCCCTCAACCGGTGAGTGGCA
GAGCAAGGGTTAGGTCATAGCCACATAAAGGTTTCCGAAACCTAGGTCTCTGCGTGCAAAGCCATTGCTGTCTGGGATCACTGCTGTTCGGGGAATT
TGCTGACCGGGGTCACTGATGTCAATAGGTCCCTGTTGTTCTGAGTTACTGCTGCCTGGGTCGGGGTGGGGGAGGTGGTGCTGCCTGTGGTATGGTC
ACCGCTGTCCAAGATCACTGCTCCTAAGAGTCATCGCATCTAGGAATCACTTCCATCTGAGGTCACTAGAGAGGTCAGTGCTGGCCAGGGTCATTAT
CATTTTGAGGTCATTATTGTCAGGCCCCTGGAAGGGTCCCTGCTGGTTCAGTGTCTAGAGGTCCCTGGACAGAGTAGGCCAGGGCCATCAGGGAGGG
CCTGAGCCCATCTTTTCCCTAGGAGGAACAGGCCTGGGGACCGGGCGAAGGCCCTGTCTGTGCTGCTGCCGCTGGTACAGCTTGAGGGCTCTGTGGC
GCCCGATCTGTACTGCATGTGTGGCCGTATCTACAAGGACATGTTCTTCAGCTCGGGTTTCCAGGATGCTGGGCACCGGGAGCAGGCCTATCACTGG
TAAAGAGCACAGTGAGTGGCCGGTGGGCTAAGGTGTGAGATGAGGGGTGGTGCTGTGGGCATCAGTCCAGCCCTGTGCCCCCTACCCCCACCCCAGG
TATCGCAAGGCTTTTGACGTAGAGCCCAGCGTTCACTCAGGCATCAATGCAGCTGTGCTCCTCATTGCTGCCGGGCAGCACTTTGAGGATTCCAAAG
AGCTCCGGCTAATAGGTGAGCACAGATCCTGGCTCTTGTCTCGTCACCCACAGGGGTTCCGAGGGGCCTGGGAAGAGGGCAGGGAGAGAGCACACTG
GGCAAGAGCTAGGATGAGCTCATCCATTTTGGACTGTCCTGCCCATACCCACACCTGGGTCCTCATACCTGTTCTGGGCCCTCAGGAGCCCTCAAAC
CCACAAATGTTCCCAAACTCACATCTGCGTGTCCATTACATCCTGAATTCCACATATACCTGTGCCTGAGCTCCTGTTCCCACCCGAGATCTTGCCA
TACTCAATGCCATACTCATATCTATGTTCATGTCCACACTCGGGCCCACAGAAATGGTGGGCCTCACTCACCCCTGCACCCACACTCACTGGAGCCC
ATGCCTCTCTCCCCCAGGCATGAAGCTGGGCTGCCTGCTGGCCCGCAAAGGCTGCGTGGAGAAGATGCAGTATTACTGGGATGTGGGTTTCTACCTG
GGAGCCCAGATCCTCGCCAATGACCCCACCCAGGTGGTGCTGGCTGCAGAGCAGCTGTATAAGCTCAATGCCCCCATATGGTAGGTGGCCCCCTCTG
CATTCTTGGCCTGACCTGGGCTGTCAGCTCCTGCACCTATGTCCATTGGCATGCTAGACTGAACCCTGAGCCAATGACCTGGCTGCTTTTAGACCAG
TGCCCGTGGCACCCCATGCCAACGTTCTAGCTATATCCAGGCCAGTTTCCTCTCCCTGGCAGTGCTGGTTGGTGCCTGGGCTGAACTGAGGATGTGG
CTTTGCATGCAGGTACCTGGTGTCCGTGATGGAGACCTTCCTGCTCTACCAGCACTTCAGGCCCACGCCAGAGCCCCCTGGAGGGCCACCACGCCGT
GCCCACTTCTGGCTCCACTTCTTGCTACAGTCCTGCCAACCATTCAAGACAGCCTGTGCCCAGGGCGACCAGTGCTTGGTGAGGCCTGTAGGGGTGG
TGGACCCGGGAAAGGGGTAAGCCCCTTCTGACTGACCCCACTCCCCAACTGCCTGCAGGTGCTGGTCCTGGAGATGAACAAGGTGCTGCTGCCTGCA
AAGCTCGAGGTTCGGGGTACTGACCCAGTAAGCACAGTGACCCTGAGCCTGCTGGAGCCTGAGACCCAGGTGAAGTCGCTGCTGAGGCCCCTCACTC
ACCTTTGCTAGGACCTTTTCTGTGGAGCCTTTCTCCCATCCTCAGACCCCTCTCCTGTCACCAGCACTCCCCATCACACCCCATTTCTTCTTGCAGG
ACATTCCCTCCAGCTGGACCTTCCCAGTCGCCTCCATATGCGGAGTCAGGTGATAGGCGGGACCTGGGGTGACTGGAAAGACGGGAGGTGAGGGTCG
CTGCCACCCAGCCTGACGCTTACTGGGTTCTTCATCCCTTCCCAGCGCCTCAAAGCGCGACGAGCGCTGCTGCTTCCTCTATGCACTCCCCCCGGCT
CAGGACGTCCAGCTGTGCTTCCCCAGCGTAGGGCACTGCCAGTGGTGCGCAGCCTTTCATGGTCGGGGTACTCTGAGGGCCAGGATGCCCGGGGGGG
AGTGGGGGAAAGAAAGGGACGACGTCCGTTGGATGCTCCGGCTTAGGTGGGGACCAAGATGCCCCTCCCGCGGGTCTGACCTCCCCCACCTTCAGGT
TCTGCGGCCTGATCCAGGCCTGGGTGACGAACCCGGATTCCACGGCGCCCGCGGAGGAGGCGGAGGGCGCGGGGGAGATGTTGGAGGTGAGGACGCG
GGACTGGGAGCTCGCGGAGGGCGAGGGGCCGCGGGCCCTGCTGAACTCCCATGTCACCCCGCGCCCGGCAGTTTGATTATGAGTACACGGAGACGGG
CGAGCGGCTGGTGCTGGGCAAGGGCACGTATGGGGTGGTGTACGCGGGCCGCGATCGCCACACGAGGGTGCGCATCGCCATCAAGGAGATCCCGGAG
CGGGACAGCAGGTGCGGTGCGTGGCAGCGCGGGTGGGGCTGAGGGCTCGCGAGGGCCGAGTGAGCCGGGCCACGAGCGGAGCGGCTCCTGTGGGCGG
GGCCTAGTGGGCGGGCTCGTAGGACCTGAGAGTTCGAGCCCTGTGGACTGGGCCCGTGGGCGGAACAGCCAGGACCGTGCGGGCGGGATTGAGGTCT
GGAGGGTCCTGTGGGCAGGGTAGTAAGGGTGGGGAAGGTCGGAGAGGGCTTGTGGGCGGGGCGGGTCCTTGGGGCGGGGCCAGGCTGGCGTGGGATG
GGCGGGGCTTCTCTGCCCACCTCGGTCCCTTTCCTCTCTCCCTTACCTCCCCTCAGGTTCTCTCAGCCCCTGCATGAAGAGATCGCTCTTCACAGAC
GCCTGCGCCACAAGAACATAGTGCGCTATCTGGGCTCAGCTAGCCAGGGCGGCTACCTTAAGATCTTCATGGAGGAAGTGCCTGGAGGTACCTGCCC
TGTGTGGGATGGGAATGAAACCGAGGTGTGAAGCATGGGACCGAGGCAGGCAGGGGTAGAGAGCCCTAGGGGGAAATGCACCCTAGTGCGTGTGGGT
GGTGTAGCCTAGAATTAGCTGAGGAGTGGCGCTGGGTGATGGAGTTGGGCTACAACATGGGTGTGTCTGGGCCTTGAGCAGAGAGATGTGGGCTGGA
GCCAGTGGGTGGGAAGAATGAACTTGGACTGTCCCCACCCAGGCAGCCTGTCCTCCTTGCTGCGGTCGGTGTGGGGACCCCTGAAGGACAACGAGAG
CACCATCAGTTTCTACACCCGCCAGATCCTGCAGGGACTTGGCTACTTGCACGACAACCACATCGTGCACAGGGACATAAAAGTAAGCCCTGGGGCT
GGCCCGCCCTCATCTGCTGAGGGTGGCGGGGAAGGAAACATGGTCCCAGACGCAGGCTGGCAGTTTAGATTAAGTGAGCAGACCTGTTGCAAAGGGT
AGGGAATTCATCAGGGAGGCTCCTTAGAGAAGGAGGGGAAAGGTTCAGCTCTGAAGCCAAACCAATTGTCAGCTCCCAGAGGGGCATATAAGTGGGA
TGGCAAGGGGAGAGTGTTGACAGAGGCAGGACCAGGCTGGGATCTCGAGGAGATGGGATCCCAGAAAGAGGGTCTAGTTCTGCTGGCAGGGGCCCAG
ACCAGTGTCCACTAATGGCTGTCAATCAGGGGGACAATGTGCTGATCAACACCTTCAGTGGGCTGCTCAAGATTTCTGACTTCGGCACCTCCAAGCG
GCTGGCAGGCATCACACCTTGCACTGAGACCTTCACAGGTAACAAGGTGTGGGGGTGGTGAGTGGGGATGCTGACCTGGGGCAGAAGATCTCTTGGA
ACTTTCCAGGGAAGGGGGTTTCTCCTAGGCATGGAGTTAGAGTCCTAATGGGGAATGAAACCCAGGGTGAGTGATTGGGCCAGGGCTGAGGTGGTGG
CATCTGGAACTGGAGCTTGGAGAAGTGATGAAATTGACTTTAGCACTTGAGGAGTGTTGATGCAGGCCAAGGTGGGAGTTGGAGGAAAAAGCAGGTG
ATGGAGTTCAGGGGGACGAGGCAATCCAGGATGTGTGCTGGAGCACTACTGTGGGTGATGGAGTCTGTGAATGTGGTGGAGCCCAGGATGAATGACG
GAAGCCTTGGCAGGCGATGGAGCCCAGGGTGGTGATGGAACTCAGGATAGATGTTTGATGACCAGGATAGGTGTTGAGGTATATTTTGGATGATAGG
TTCAGTATGGGTGCAGTCGGCCTGAGGATGACGGCATTCCCCTCCCTGCTCCAACCCCATGATGAAGCCTAGATGGGCATTGGTGCTCCTGTTTCTG
TCCTAGGAACTCTGCAGTATATGGCCCCAGAAATCATTGACCAGGGCCCACGCGGGTATGGGAAAGCAGCTGACATCTGGTCACTGGGCTGCACTGT
CATTGAGATGGCCACAGGTCGCCCCCCCTTCCACGAGCTCGGGAGCCCACAGGCTGCCATGTTTCAGGTGAGACCTCTTTGGGCCTGGCCCATGGAA
GTGGCATAGGGCCAGCCTGGGCCTTGGACACCTCTGAATGTCACCCTTGTTCACCCTCCCCCCACAGGTGGGTATGTACAAGGTCCATCCGCCAATG
CCCAGCTCTCTGTCGGCCGAGGCCCAAGCCTTTCTCCTCCGAACTTTTGAGCCAGACCCCCGCCTCCGAGCCAGCGCCCAGACACTGCTGGGGGACC
CCTTCCTGCAGCCTGGGAAAAGGAGCCGCAGCCCCAGCTCCCCACGACATGCTCCACGGCCCTCAGGTGCTTGCGGGTGGCGGGATGGGCACAGTGG
AGGGCAGAGGAGTTGTGGAGCTGTGAGGGTGGAGGAGAGCCCAGCTGATGGCTCTGTCCCTCCCTCAGATGCCCCTTCTGCCAGTCCCACTCCTTCA
GCCAACTCAACCACCCAGTCTCAGACATTCCCGTGCCCTCAGGCACCCTGTCAGCACCCACCCAGCCCCCCGAAGCGCTGCCTCAGTTATGGGGGCA
CCAGCCAGCTCCGGTGAGACCAAGGCTCCTGGGATGGGTTCCTTTTGCCTGGTTTTGCCTTTTTCTCCTCTCCTACAAAAGCCCTCCCTGGGGACCT
GGGCACCTTGACCACTTGTGAATGTGGCATTTGGTGCCTCCCCATGCCCTGTTCTGGCAACTCTAACTTGGACTTGTTGTGTCCTCTCAGTGCGGGG
TTTATCTATGTTCATGCCTGTGAGGTAGGCATAAAAGTAGGAGAGCCAGGATTCAAACCCGGCAACAGAGGTGACTGGCCGGTTGCTGCCCGTCCTC
AATCAGCAGCTCGCCCTTGTGCCCAGGGTGCCCGAGGAGCGTGCGGCCGAGGAGCCTGCGTCTCCGGAGGAGAGTTCGGGGCTGAGCCTGCTGCACC
AGGAGAGCAAGCGTCGGGCCATGCTGGCCGCAGTATTGGAGCAGGAGCTGCCAGCGCTGGCGGAGAATCTGCACCAGGAGCAGAAGCAAGAGCAGGT
GGGCGGCCCACTCTAGCGCCCCCTGGTGGTCGCAAAGGGTCAGGACACCTGTTGATGTCCCCGCCCCCTACCTCCGCGGCAGCGTCTCTTTTGGCTG
GAGCACTCGCTGACAACCCCTCTCTTCCTTCTCAGGGGGCCCGTCTGGGCAGAAACCATGTGGAAGAGCTGCTGCGCTGCCTCGGGGCACACATCCA
CACTCCCAACCGCCGGCAGCTCGCCCAGGAGCTGCGGGCGCTGCAAGGACGGCTGAGGGCCCAGGGCCTTGGGCCTGCGCTTCTGCACAGACCGCTG
TTTGCCTTCCCGGATGCGGTGAGGGCGCCTTCTGGTAGTTAGAGCTGCCCAACAACAGGTAGTGAGTTCCCCGTGCCTGGTGAGGTGCCAGGACTTG
ACGTTCCCAGATTCCCTGTCTCCTCTGTGAAGATCAGGCCTGCAGCAAAAAACCGTCTGCCCAGTCCTAGCTTCCCAGGCCTTCCCTGGACCTCAAG
CCCTGCCCACCNNNNNNNNNNNNNNNNNNNNNNNNNNNNNCCCTGCCTCTAGTTGAGGCTCAGCTGTCTCAGCGGCGCCTCCCTCCCCCTGCAGGTG
AAGCAGATCCTCCGCAAGCGCCAGATCCGTCCACACTGGGATGTTCGTTCTGGACTCACTGCTCAGCCGTGCTGTGCGGGCAGCCCTGGGTGTGCTA
GGACCGGGTAGGAGGGGAATGCCACGGGCCTCCTGCCAGCGAGGGTGTGGTGCTTGCTGGGCGCGGTGAACATCGAATGGGGCCGGTGGGGGCCAGG
CGGGACAGGGGCAGGCAGGCGCCGGTGGGGGCGTGACTAAATGGACATCTCCCATACCGGCACCGCCTGGGGCCTGCCCAGAGCCGGGCACCCTACC
CCCCGCACTTTGGGGTCTGGGGTTCCCAAACGGGCGTTGTAGCCTTGCCTGAGTTCACCGCACTGGGCTGCAGAGGTGGAGAAGGAGGCGGTCTCAC
CGAGGTCAGAGGAGCTGAGTAATGAAGGGGACTCCCAGCAGAGCCCAGGCCAGCAGAGCCCGCTTCCGGTGGAGCCCGAGCAGGGCCCCGCTCCTCT
GATGGTGCAGCTGAGCCTCTTGAGGGCAGAGACTGATCGGTAAAGCCCCTTGGAATCGCTCATAGCCTCTGCCGGGCTTCAACCCACTCACCACTCA
CCGCTCCATTCTACTCTTCTGCGCCCCACAGGCTGCGCGAAATCCTGGCGGGGAAGGAACGGGAGTACCAGGCCCTGGTGCAGCGGGCTCTACAGCG
GCTGAATGAGGAAGCCCGGACCTATGTCCTGGCCCCAGAGCCTCCAAGTGAGTGGGCCTTGGCTGGAGAACATTATTGGTGGGTTCAAGGCAGCTTC
TAGCACAAGGCACCCTTGGGCTCATCACCTGACTTGGGCTCATCACCTGAGCGGGCCTTGGCGGGAGAACATTATTGGTGGGTTCGAGGCAGCTTCT
AGCACAAGGCACCCTTGGGCTCATCACCTGACTTGGGCTCATCACCTGAGTGGGCCTTGGCTGGAGAACACTATTGGTGGGTTCGAGGCAGCTTCTA
GCAGGAGGCACTCTTGGGCTCATCACCTGACTGCTTCTTGACAGCTGCTCTTTCAACGGACCAGGGCCTGGTGCAGTGGCTACAGGAACTGAATGTG
GATTCAGGCACCATCCAAATGGTGAGTCGGGGAGTGCTTGGCTATCCCTGACCTCACCAGCCAAAGCCTCCATCTCTGTCCATCTTCCTGCTCTTCT
ACTGTGCCCTCTGATGCAGAGAATCTCACTACCAGAAGAACACTTAGTATTCTCGTCCCATTGTATGGATGAGAAAACTGAGGCCCAGAAGGGTGTG
ATCTGCCTCATTATTTTGGCAACAGAGCAGAGCTAGTACCTGGGTCTCGACACATCTTTCTGTAATTTCTTATTTCCCTCTTTCTGCGGGTCTTTGA
CCACATCCAGCTGTTGAACCATAGCTTCACCCTCCACACTCTGCTCACCTATGCCACTCGAGATGACCTCATCTACACCCGCATCAGGTACATCCTG
GGCCCCCCAAGTGTGAACCATGCATATGGCCTCATCCTGGCCAACTGCAGGCCTGCCTAGGTTCCTTCCTGGAAACCAAAGGGGCACCTGGGTCCCC
TAGGGACAGAGGGGGCACTGGGCAGACAGTGTGTGCAAGATAGAGTCCAGGGCCACCTTCTGGCTGAGCCACACTGAGTCCATTACCCCCAGGGGAG
GGATGGTATGCCGCATCTGGAGGGCCATCTTGGCACAGCGAGCAGGATCCACACCAGTCACCTCTGGACCCTGAGAGCTGAATGAGGGCATCATAGG
CCAGACAGGCCCCAAGGATGGATGAATGGAGAGGACAAAGGCAGCTTCTGACACACCAGCCCCAGGACCTGGGGCGACTGGAGGAAGCCAGGCGAGT
GGGGCCCAGGACTGGTTCCAGTGAGAGAAACCAACCACAGGCACCCAAGCACTACCAGACAAAGCGTATTAAACAGAACACTTTTGAACCTTTGTCC
TGGCAATTTTGGAGGTGTATGGTGGGAGGGGTATCCTGGGAAGAGCCCCCTAGGTCTTTTTTAAAAAATTTTTTTTGTTGGCCGGGCATGGTGGCTC
ATGCCTGTAATCCCAGCACTTTGGGAGGCCAAGGTGGGCAGATCACGAGGTCAGGAGATCAAGACTATCCTGGCTAACATGCTGAAACCCTGTCTCT
ACTAAAAATACAAAAAAATTAGCTGGGTGTGCTGGCGGGCACCTGTAGTCCCAGCTACTCGGGAGGCTGAGGCAGGAGAATGGTGTGAACCTGCGAG
GCGGAGCTTGCAGTGAGCCGAGATTGCGCCACTGCACTCCAGCCTGGGCAACAGAGCGAGACTTTGTCTCAAAAAAAATAAATAAATAAATGAAAAA
AAAATGTTTTTAGGCCGGGTGCGGTGGCTCATGCCTGTAATCCCCGCACTTTGGGAGGCCGAGGTGGGTGGATCATGAGGTCAGGAGTTCGAGAAGA
GCCTGACCAACATGGTGAAACCTCGTCTCTACTAAAAATGGAAAAATTAGCTAGGCGTGGTGGTGCGTGCCTATAATCCCAGCTACTCAGGTGGCTG
AGGCAGGAGAATCGCTTGAACCCAGGAGGCAGAGGTTGCAGTGAGCCGAGATCGCGCCATTGCACTCCAGAGCGAGACTCCGTCTCAAAAAAAAAAA
AAAAAAAAACCTTTTTTAGAGACAAGGTCTTACTCTGTCATCCAGGCTGGAGTGCAGTGGCATAGTCATATTCACTGCAGCCTCAAGCTTCTGGATT
CAAGCGATCCTTCCTCCTCAGCCTCCTGAGTAGCTGGGACCACAGCTGTGCACCACCCACACCCACCTAATTTTTAAACTTTTTTTTTTGTAGAAAT
AGCATCTCGCTTTGTGGCATAGCTCACTGCAGCCTTGAACTCCTGGGCACAAGCAATCTGCCTGCCTCAGCCTCCTGAGTAGCTGGGACTACAGGCA
TGTGACACCACCACCTGCAGCTAATTTTTAAAATTTTGTCGAGATGGGGTCTCATTATGTTGCTCAGACTGGTCTTGAACTCTTGGGCTAAAGCAAT
CCTTCTGCCTCAGCCTCCCAAAGCATTGGGATTACAGGCGTGAACCACTGTGCCTGGTTTCTACTGAAGTCTTTGTGGCAGAGTCTGAAGTTCCTTA
ATCTGGCCCCTCTTACTTCCCTGGCTCTTTCCTACAATCACCTTTCTTCCTCCCTGCCCCAGCAGACACCAGCCTTTTATTGCTCTTAGAATAGACT
TTATTGACTTTAGCCAAGGGCAGGCCCTGAGATGGGGGTCCAGAGAGAGAGGCTTGGTGGGGCTACGTCCTGGGGGCCAGGTTGGTTCTGAGGGGTA
GAAGGCCATCCACCCACTCGCACGGCTGCTCCAGGAGGGCTTGCCACAGCTGCTTCTCCTCAGGTGTGGAATCCATCCAGGGCACCTGCAGCCCATA
GCTGCTGCCTGGATGTGGGTGGGCAGGGGTTGAGGGCATGATCACACTGGACACCTTGGGGCCCCCAAACACCTGCCTGGTCCCAGATTATGCACTG
TCCCCCGTTACCACCCTCAGTTCTCAGTAGATATCAAAGCTCAGGAAAGGACAGAGAGGTATCCAGGGCCACACACTGAGCCCCCATCTCCCAGGGC
CTGTCCCAGGGCCTGTCTCAGGGTGCTGTCCCACTTACCGGTGCCCAGGCTGAGGCGTGTGCCCCCCAGCTGGCGGTTGGCCAGGGCCCCATGGTCC
CAGAGGGAGAGCTCGGCACAAGCCTGGCGCAGGTCAGCAGGCCCAAAGCCATCGTACACCATGGTGTGATTGAACACAGGGCTGAGGCTGCGTCGCA
CAACCCTTGTACGCTGGCGGCTGGCCCGGCTGTCATCAGGCAGCACGAAGCTGTGCGGGAGGTGGCCTGGCATCAGGTGACCCCCCTCACACTCCCT
AGAGTCATCCAGTCACCACGTCCCACTCATTCTCCCTCACATATGTCCATGTCCCCTGGCTCCTGCCTGCCTGGCCTTAGACCCTCACTGCCCTGGG
ACCTTTGCACCAGCCTCCTCTCAGGTCTCCTGGCTTTAAAAGTTACAGCTCCTGGCCGGGCGAGGTTGCTCACGCCTGTAATCCCAGCACTTTGGGA
GGCCGAGGTGGGTGGATCACCTGAGGTCAGAAGTTCGAGACCAGCCTGGCCAACATGGTGAAACCCCATCTCTACTAAAAATACAAAAATTAGCTGG
GCATGGTGGCATGCACCTGTAATCCCAGCTACTTGGGAGGCTGAGGCAGGAGAATCGTTGGAGCCCAGGAGACTGCGGCTGCAGTGAGCTGAAATCA
CACCACTGCACTCCAGCCTAGGCAACAGAGTGAGACTGCATCTTAAAAAAATTAATAATAGCCGGGCGCGGTGGCTCATGCCTGTAATCCCAGCACT
TTGGGAGGCCGAGGCGGGCGGATCACGAGGTCAGGAGATTGAGACCATCCTGGTTAACATGGTGAAACCCCGTCTCTACTAAAAATACAAAAAAATT
AGCTGGGCGTGGTAGCGGGCGCCTGTAGTCCCAGCTACTCAGGAGGCTGAGGCAGGAGAATGGTGTGAACCCAGGAGGCGGAGCTTGCAGTGCACCA
AGATGGGGCCACTGCACTCCAGCCTGGGCAACAGAGCGAGANNNNNNNNNNNNNNNNNNNNAATAATAATGTTACAACTCCTATTCACAGGGACTGC
AGAGCAATGTCTCTGAAATGCAGTTCTGCTATTCTCGCTGGCTCAGTGACTTTTATTATCTCCCTGTTGCTCCACCACCACCCCTCCTCAAGCAGTT
TCCAAGGTTTTTTTTTATTTTTTGAGATCGAGTCTCGCTCTGTTTTGCCCAGGTTGGAGTGCAGTGGCGTGATCTTGGTTCACTGCAACCTTCTGGG
TTCGAGTGATTCTCCCGCCTCAGTCTCTCAAGTAGCTGGGATTACAGGCACCCACCACCACGCCCGGATAATTTCTTGTACTTTTGATAGAGATGGG
GTTTCACCATGTTGGTCAGGCTGGTCTCAAACTCCTGACCTCAGGTGATCCACCCGCCTCAGCCTCTTAAAGTGCTGGGATTACAGGCATAAGCCAC
CGTGCCTGGCCTGTTTCCAAGGTTTTCAAAGCCTGGGAACCCCCTCTGCAAAATACAGTGTTGCTCAGAAGTACAGTACCTCTGTACTGCAGCCTCT
GGCTGCATCAGAGTGGACACCCAGAAGTGACCCGCCCACCTCCATTTCACTCTCTAACAGTGGGGGCAGCACCTGGAGGCACCCCTAGAAGTCCCCT
AGAAGCTTACACTGAACTATAAGTTCCCAGCCAAGCCCCACAGCCTGGCCTCCCAGGTTCTCTATGGAAGGACCCTTGCAGCCCTCAGCCTCAGCTT
TTCAACAAGTCCTATAGGCGCCAGTCACGCTGAAATGCAGCTCCTCAAAGGTGTCCTCAACTTCCCTGACTCCAGGCCTTTGCTCAAACCGTCCCCT
TCACCCCTGCTCAGTGGTGAAAGCCCAGGCTGCGTGATCAAAGGTTGATTAGTAAGGGTTTGTGGAGGTTGGGCACTCCACTGCAGGCAAAAGAATG
GGAAGCCCGGAGGGCCAGCACTCCTCACCATTGTACGTAAGTGTCCAGGGATCCTGCCCGCAGCGGCAGGAGGTCCCGAGCCTCCTTCACCCAGAAG
TGCAGCTCCCCGCTCGGGGGCAGTCCTGCGCCTGCGGAGAGGCTCGGCTCAGGCCCGCACACGGATGGAGTCCACCGCCCCCAAACCCGGGGACTGG
AGTCTCCCGCTTTTCAGGGCGTGTCCAGCTTGGCCTCTCCGGCTGTCACTCACCCTCGGAGCCGGCGGGGACGTACTTGAGGGACAGGGCGAGTAAC
CCGCGGCTCGGAAGGTCGTCGGGAGAGGGTGGGACCTGCGAGAGGCGGGCTTATCGTGGAGCAGGGGCTAATGGAAAGGGGCCTCAGGAGGGTGGGG
TCTGCAGACCCGGATGGGGTGCGGCTAGAAGAGACGGCGGGGCCTGCAGGGGCAGAACCTAGGGGTCCTAGCGCCCTCGGGGAAGGGGCCGTGGCCG
GCCGGGCTTCGCCTGGGGCCATGAGGTTAAGAGGTTGAGGGGAGGTTCTGTCGAAGGCGGGGTGTGAGGGGGCTGCGGGAGAGCCTGGTGGGGTAAA
TGCAGGAGACCCGGGCCGCAGGTCTCCCCACGCGGCCTGGCTGCCTCACCCGGGGCTGCAGGGGGAGCCAGGTGGGCTCAGAGCCCCAGTCCCACGT
GTCCAGGGGCACTTCAACTTCGCCCAGAAAGATGTTGCGACCCAGGCTTTCGCGGTGCCACACAGACAGGCTCAGCACGCGGCCCTGAAGCTCGGCC
TGCGGGACGGAGTACTGAGGACAGGAGGTGAGCTTTAGTGGAGCACTGCTGGTGGCCCGCGTAGATGCTGCGCGAGTTGGCTGAGGCAGGTCCTACC
GCGTTCCTACCATGATGGAATTCTGGGGAGCCCCTAAGGGCATTAATGGGGACCTGCACTATCACCACGCCCACCACGAGGCTGACAACACTGGATA
ACGAGTTAATGGGCCCCCTCCGCCGATCCTCCGGGCAATGACGTTACTGGCTGCCCTTGCCACCTAGCCCCGCAGGAAGGGGGCGTCCAGTTCATTA
ACGGGGAACCGCATCGTGGTCACAGCCTCACCCGGAGAGTGTCGTTGAAAACCGGATTCAGATTCCGTTTCTTCACCGCCGTCTTGCGCTTGCTCTG
CTTATCCGGGAGGAGGTAGCTTTTGACGTAGCTGGGGAGGTGAGAACCCGAGGTGAGGAGGGGCCCTCCCAGAGCCTTCTCCCCTGCCTGTGGGCTC
CCCCAGCCACCATCCCGAACACGTGCCAGGCCTCGTGCTAAGCGCTTTACAGGGATTGTCTCGCTTAATCGCACGCCTCCCAATAACGCTGTTGTTC
CCATTTTGAAGATGAGGACGAGGAGGCCGAGACCCTGTGAATGGTGGGCTGGGCTGTGACAGCCGCGCCCCGCTTGGCCGGCGGGGCACTCACGGGT
CCGAGCGGCGGCGCCGGGCGGCGGCCAGGCCCTGGCACTGGATCACGTGCACGCGCAGCTCGGCGGCGCCCGGCTCGTAGTGCAGCGCGAAGTGCAC
GGAGCCGCGGACCTGCACCGCCTCCGCGTCGCCTGACAGGCTCATCTGGCTGCCGCTCAGCTGCGGACGGGAGTGGGTGGGAGTCAGGGCCGCTCGC
AGGGCTCACGTCGGGGCCGCGGGCAGCGCGGAGGCTTCAGACCCGGGTCATAGGTGGCAGGCTGGGGGGCTGCAGCGGTGGGTCCCGCGGCGAGGGA
GGGGCAGGCAGGGGCTACGCATCGGAACGGGTCCACCCCCCGGCCGCCCGGGTCCCCTCCCTCCCGCCTCACCGTGGAGGAGTTAAGGGTGGACACC
GAGGAGCTGCTGCTGAGCATGCGGTCGAGAGAGGGGTCGGGCCCCGGGGCCTCCTCCCCATTCTCCAGGATCTGGGACGCGGCCTTGGTCTGCAGAG
GGGGCAAGTGACGGGGCGCCCCTTCTTTCCCCACCCCTGCCCCGAGCGCCCTGGGTCGCGGGCGGCTCGCAGCCCTGGGCAGGAGCGCTCCCCGCCC
GGAGTCCGCTCCGGATGTTGAGAGCAGCCACGGGCCACTCCCGCCTACCTGGGCTTGCTGGGGCCGCGGCTCCTGCTCTCCCCCCGACGCGGGCTCC
AGCTCCGGGTCAGCCTCCTCGGCACAGACCTGTTGGTCTCCTTGGCCAGGATCTGGGGTGGGGCACGAGATGCTAAGCGAGCCCTCTCCTGCCCTCC
CCTAAGCAAATTTGTAGGAACTGGTTTACAACCCCAGCGAGCTGCAGATTCAGGCCCCGGTGCTGCCCTGGGATCGTCCCCACCTCCGACGCGGGGT
GGGAGTGGGGGTGACGAGGGTGAACACAGGTGGTTGGGGCCCCTTAGAGCTGCCTCTGACCCGCGAAACCTCTCCGTGCTCCCCAACAGGCGCTCCC
ACTCACCTTCCTGGGCCTGGGACGCCTCCTCAGGATCTGAAGCCTTTAGGGGGACAGAAGGCGATGGGAAATCAGGTCCCTGAAGGAAGAAAGGGGT
GGGCAGCCCTCCGGGCAGGGCTGGCAGCCAGCTGCAGGAGCGGTGAGACCAGTGCTTCACAGCCCACCCCGCAGGGCTTGTGCCGCCTGACTCCCTA
CTCCCATTGGTGGGGTCATTCGTACCTGAGTCCTCCACCTCCGCCAGGCCAGGCCAGTCCCATTCCTTTCTCACTCCTTTTTTTATTTTTATTTTTT
ATATTGACCCATTGGTAGACAACCTTTTTTGCTTTTTTTTAATNNNNNNNNNNNNNNNNNNNNNNNNNNNNNNNNNNNNNNNNNNNNNNNNNNNNNN
NNNNNNNNNNNNNNNNNNNNNNNNNNNNNNNNNNNNNNNNNNNNNNNNNNNNNNNNNNNNNNNNNNNNNNNNNNNNNNNNNNNNNNNNNNNNNNNNN
NNNNNNNNNNNNNNNNNNNNNNNNNNNNNNNNNNNNNNNNNNNTTCAAGCGATTCTCCTGCCTCAGCCTCCCAGTAGCTGAGATTCCAGGTTATGCA
CCATCATGCCCAGCTAATTTTGTATTTTTAGTAGAGATGGGGTTTCTCCATGTTAGTCAGGCTGGTCTTGAGCTCCTGACCTCAGGTGATCTCGGCT
TCCCAAAGTGCTGGGATTATAGGCGTGAGCTGCCACGACCGGCCTTTTTTTTTTATTTATTTTTTATAGACATGGGGGGCATTTTGCTATGTTGCCC
AGGCTGGTCTTGAACTCCTCGGCTCAAGCGATCCTCCCACATCAGCCTCCCAAAATGCTGGGATTACAGGCATGAGCCACCGTGCCTGGCCCCACTT
CACCCCTTAATAGCCAGATTCAGAAGTTCCCTTAGAGGCTGGGTCCATATACCACTCACTGTTCACCACCGTTCACCACTGTTTACCACCATTCACC
ACCGTTCCCCACCGTTCACCACTGTTCCACCCAGGAGGTGATGAGGTGCAGACACAGGAAGGAACATTTCCAGGGTCTCCCCATTCCCAGGCTGGGG
CTCTTTCCCCCCTGCCCCCTGCACATTCCACCTCCCCTCCAGGGACACTGTACTCACATGTTGGCTCATTCACTTACCTCAGTCTCCCTGAGCCTCT
CGTGAGGGGCCTCATCAATGGTGAGCCTAGGAGTAGGGAGAGGACGCTCTCAGAGGGAGGGACCCTGGTGACTGGTGGGCACCATCTCCCCCTTCCT
GAGACTCCTCCTCACCTGGGCTCTGGCCCCTCTTCCTTCTCTTTCACAGCAGCCTCAGCCTCCCTGTCGTGGCCTGGAGCCTGGTCTCCTGGGCGCA
GGTGAGAAGTTCTGTGAGCCCCCATGCTCAGGAAGCCTGGCTGTGACTCGGGAGAGGCCCTGGGAGATACCCACCCACCCCATGCCCACGGAGGGGC
ATTGCCCACTGAAAGACACACAGTACTGGGGGCAGCCAGGACTGGAGCCCTAGTGGTCCTCTCTCCCTGTCCACATACAGCCAGCGCCCTGGACGGC
ACATGGCTTGCCCTGCCCCGAGGATCTCCTCTCACCCCTGGTGCTCTTCTTCCTGCGGATAGACGCTCGGACAAGGTCAGAGCCGAAGTGGGCATTG
TGGTGCCGCTGGGAGCGTGCTTCCTGGAACCAGTCCCCTGTCAGGATCTTCAGCTGCCCAGGGTCTGCCACTGAGGCCCGGAGCTTGCTGGAGGAAG
GGGGAGGGTGTGGCTGTCATGACTCACCCAAGCAACATTCCCGCCACCTACATTGTTAACAGGCTTGGGACCAGGGGCCAGGGACCCAACAGCAAAT
CAGACTTGATCTGTGCTGTGGAGGAGGTCGGGGTGCTGGGGAGACCAAGTCCAGAAGAGACAAGTACACTGTAGTGAGGTGGATGATGTGATAGAAG
TAAGAAGAGCCAGCTCTGCCTGTGAGAATCCAGGAGGGCTTCCCAGAGGAGGTGACATTTGAATTGCCTTTATTTATTTATTTACTTAATTATTTTG
AGATGGAGTCTCCCTGCTATGCCCAGGCTGGAGTGCTGTGGCGCAATCTCAGCTCACTGCAACCTTCACCTTCCAGGCTCAAGTGATCCTCCCACCT
CAGCCTCCTGTGTAGCTGGGACTACAGGCGTGTGCCACCATGCCCAGCTAATTTTTTATATATTTTTTTGTAGAGACGGGGCTTTTCCATGTTGCCC
AGGCTGGTCTCTAACTCCTGGACTCAAGCAATCCACCTGCCTCAGCCTCCCACAATGTTGTAAGTCACTGTGCCCAGCCTTGAATTTCTTCTTAAAA
GACAAATTGGAACTCTCCAGGTAGAGAAGGATAATAATTATTATACTTTTAATTTTATTATTTTTTTTTGAGACAGGGTCTTGCTCTGTTGCCCGGG
CTGGAGTGCAGTGGCATGATCATGGCTCATTGCAGCCTGACCTCCTGGGTTCAAGCAATCCTCTCACCTCAGCTGCCTAAATAGCTGGGACTACAGG
CGCACACCACCACGCCAGGCTAATTTTTTATATTTTGTAGGAATGGGGTCTCACTGTGTTGTCCAGGCTGGTCTTGAATTCCTGGGCTCAAGCAATC
CTCCCGTCTCAGCCTCTCAAAGTGCTAGGATTACAGGCGTTGCCACTATCTCTGGCCAATTCCTCTTAAATCAGTGAAGTAGGACTCCTTAGCCCCA
TTTTACAGACGACGAGCATGGTGCTCAAGGAGGTCAGGTGAGTTGCCAAGGCTACGTAGCTAGGAAGTGTCTGTCCCCAAACATTGCTTGTAACGCC
CATGCTCTTCTACAACTGTGCTCTTCCAGGAAGAAGTACCAGCATAGGCATAGAAGTGAAGAGTGGGTTCAGGGACTGGGGAGCACCTGAGTGGCTG
GAGGGGTCACTTTGTGTCTGTGTGTCGGGTCGGAGTTATGGTGAAAGAGGAGATGGTGGGGGCTGGCAAGGACCGACCAGGGAGGCCCAGTGGACCA
TGCCTAGGAGCTTGCCCTTGATACTGGGGAGCCAGGGGAAGTTTTCAGCGGGGATATTAAGGACGGATCTGGCCAGGCACGGTGGCTCGCGTCTGTA
ATCCCAGCACTTTGGGAGGCTGAGGCGGGTGGATCATCTGAGATCAGAGGTTCAAGACCAGCTTGGCCAACATGGCGAAAACCCATCTCTACTAAAA
ATACAAAAATTAGCTGGGCATGGTGGCATGTGCCTATAATCCCAGCTATTTGGGAGGCTGTGGCAGGAGAATCGCTTGAACCCGGAGGGGTGGAGGT
TGCAGTGAGCCAAGATTGTGCCACTTCACTCCAGCCTGGGCGAAAAAATGAAACTCTGTCTCAAGAAAAAAAAAAAAAAGCAGACAGATCTGGGGAG
CACCAGCTGCAGGAGGTGGGCCCAAGAGGCAAGCCTGGAGGCAGGGAGGCTGGCGAGAAAGCTGGTGCAGTCACCCCTGGAGAAGTGATGAGCTGTG
AGCTGGCCAAGGCCAGAGGAGACTGAAGGGCAAAACCAAGAACCACGCAGACATCTGACAGGCAGTGGTGTCGGTAGGGAGCAGGATGGGGGCCACT
CAAGCCTCTTGGTGCTCCCCGGCCAGGGTCTGCCCTGCCTTACCTGACCCGCCCCTCCTCCAGCTGGCGCAGGCGGGCATCTCGTTGGAGGACGCCA
GCAATGGCCTCCTGCTCCTCCTCTGTCAGGAAGCTGAGGTCCAACAGTCCTTCAGTCTCAGGCTTTGGCCCATGCGCCATGGGGAGGGAGGGCAGAG
CCCAAAGCCCCTCTTGCGATGGGTGGCCCCTCTGGGGCATCAGCTGGGGGGCTGTGCCCCAGCTGGGCACACGGAGCTTCCTGGGGGCAGACCGAGG
GTCAG
HUMAN SEQUENCE - mRNA
GAATTCGAGGATCCGGGTACCATGGGGCTGGAGTGGGGACCGAGGCCCTGCTCACTCCCCTGGTGGGCCGGCTTGCCCGCCTGCTGGAGGCCACACC
CACAGACTCTTGTGGCTATTTCCGGGAGACCATTCGGCGGGACATCCGGCAGGCGCGGGAGCGGTTCAGTGGGCCACAGCTGCGGCAGGAGCTGGCT
CGCCTGCAGCGGAGACTGGACAGCGTGGAGCTGCTGAGCCCCGACATCATCATGAACTTGCTGCTCTCCTACCGCGATGTGCAGGACTACTCGGCCA
TCATTGAGCTGGTGGAGACGCTGCAGGCCTTGCCCACCTGTGATGTGGCCGAGCAGCATAATGTCTGCTTCCACTACACTTTTGCCCTCAACCGGAG
GAACAGGCCTGGGGACCGGGCGAAGGCCCTGTCTGTGCTGCTGCCGCTGGTACAGCTTGAGGGCTCTGTGGCGCCCGATCTGTACTGCATGTGTGGC
CGTATCTACAAGGACATGTTCTTCAGCTCGGGTTTCCAGGATGCTGGGCACCGGGAGCAGGCCTATCACTGGTATCGCAAGGCTTTTGACGTAGAGC
CCAGCCTTCACTCAGGCATCAATGCAGCTGTGCTCCTCATTGCTGCCGGGCAGCACTTTGAGGATTCCAAAGAGCTCCGGCTAATAGGCATGAAGCT
GGGCTGCCTGCTGGCCCGCAAAGGCTGCGTGGAGAAGATGCAGTATTACTGGGATGTGGGTTTCTACCTGGGAGCCCAGATCCTCGCCAATGACCCC
ACCCAGGTGGTGCTGGCTGCAGAGCAGCTGTATAAGCTCAATGCCCCCATATGGTACCTGGTGTCCGTGATGGAGACCTTCCTGCTCTACCAGCACT
TCAGGCCCACGCCAGAGCCCCCTGGAGGGCCACCACGCCGTGCCCACTTCTGGCTCCACTTCTTGCTACAGTCCTGCCAACCATTCAAGACAGCCTG
TGCCCAGGGCGACCAGTGCTTGGTGCTGGTCCTGGAGATGAACAAGGTGCTGCTGCCTGCAAAGCTCGAGGTTCGGGGTACTGACCCAGTAAGCACA
GTGACCCTGAGCCTGCTGGAGCCTGAGACCCAGGACATTCCCTCCAGCTGGACCTTCCCAGTCGCCTCCATATGCGGAGTCAGCGCCTCAAAGCGCG
ACGAGCGCTGCTGCTTCCTCTATGCACTCCCCCCGGCTCAGGACGTCCAGCTGTGCTTCCCCAGCGTAGGGCACTGCCAGTGGTTCTGCGGCCTGAT
CCAGGCCTGGGTGACGAACCCGGATTCCACGGCGCCCGCGGAGGAGGCGGAGGGCGCGGGGGAGATGTTGGAGTTTGATTATGAGTACACGGAGACG
GGCGAGCGGCTGGTGCTGGGCAAGGGCACGTATGGGGTGGTGTACGCGGGCCGCGATCGCCACACGAGGGTGCGCATCGCCATCAAGGAGATCCCGG
AGCGGGACAGCAGGTTCTCTCAGCCCCTGCATGAAGAGATCGCTCTTCACAGACGCCTGCGCCACAAGAACATAGTGCGCTATCTGGGCTCAGCTAG
CCAGGGCGGCTACCTTAAGATCTTCATGGAGGAAGTGCCTGGAGGCAGCCTGTCCTCCTTGCTGCGGTCGGTGTGGGGACCCCTGAAGGACAACGAG
AGCACCATCAGTTTCTACACCCGCCAGATCCTGCAGGGACTTGGCTACTTGCACGACAACCACATCGTGCACAGGGACATAAAAGGGGACAATGTGC
TGATCAACACCTTCAGTGGGCTGCTCAAGATTTCTGACTTCGGCACCTCCAAGCGGCTGGCAGGCATCACACCTTGCACTGAGACCTTCACAGGAAC
TCTGCAGTATATGGCCCCAGAAATCATTGACCAGGGCCCACGCGGGTATGGGAAAGCAGCTGACATCTGGTCACTGGGCTGCACTGTCATTGAGATG
GCCACAGGTCGCCCCCCCTTCCACGAGCTCGGGAGCCCACAGGCTGCCATGTTTCAGGTGGGTATGTACAAGGTCCATCCGCCAATGCCCAGCTCTC
TGTCGGCCGAGGCCCAAGCCTTTCTCCTCCGAACTTTTGAGCCAGACCCCCGCCTCCGAGCCAGCGCCCAGACACTGCTGGGGGACCCCTTCCTGCA
GCCTGGGAAAAGGAGCCGCAGCCCCAGCTCCCCACGACATGCTCCACGGCCCTCAGATGCCCCTTCTGCCAGTCCCACTCCTTCAGCCAACTCAACC
ACCCAGTCTCAGACATTCCCGTGCCCTCAGGCACCGTCTCAGCACCCACCCAGCCCCCCGAAGCGCTGCCTCAGTTATGGGGGCACCAGCCAGCTCC
GGGTGCCCGAGGAGCCTGCGGCCGAGGAGCCTGCGTCTCCGGAGGAGAGTTCGGGGCTGAGCCTGCTGCACCAGGAGAGCAAGCGTCGGGCCATGCT
GGCCGCAGTATTGGAGCAGGAGCTGCCAGCGCTGGCGGAGAATCTGCACCAGGAGCAGAAGCAAGAGCAGGGGGCCCGTCTGGGCAGAAACCATGTG
GAAGAGCTGCTGCGCTGCCTCGGGGCACACATCCACACTCCCAACCGCCGGCAGCTCGCCCAGGAGCTGCGGGCGCTGCAAGGACGGCTGAGGGCCC
AGGGCCTTGGGCCTGCGCTTCTGCACAGACCGCTGTTTGCCTTCCCGGATGCGGTGAAGCAGATCCTCCGCAAGCGCCAGATCCGTCCACACTGGAT
GTTCGTTCTGGACTCACTGCTCAGCCGTGCTGTGCGGGCAGCCCTGGGTGTGCTAGGACCGGAGGTGGAGAAGGAGGCGGTCTCACCGAGGTCAGAG
GAGCTGAGTAATGAAGGGGACTCCCAGCAGAGCCCAGGCCAGCAGAGCCCGCTTCCGGTGGAGCCCGAGCAGGGCCCCGCTCCTCTGATGGTGCAGC
TGAGCCTCTTGAGGGCAGAGACTGATCGGCTGCGCGAAATCCTGGCGGGGAAGGAACGGGAGTACCAGGCCCTGGTGCAGCGGGCTCTACAGCGGCT
GAATGAGGAAGCCCGGACCTATGTCCTGGCCCCAGAGCCTCCAACTGCTCTTTCAACGGACCAGGGCCTGGTGCAGTGGCTACAGGAACTGAATGTG
GATTCAGGCACCATCCAAATGCTGTTGAACCATAGCTTCACCCTCCACACTCTGCTCACCTATGCCACTCGAGATGACCTCATCTACACCCGCATCA
GGGGAGGGATGGTATGCCGCATCTGGAGGGCCATCTTGGCACAGCGAGCAGGATCCACACCAGTCACCTCTGGACCCTGAGAGCTGAATGAGGGCAT
CATAGGCCAGACAGGCCCAAGGATGGATGAATGGAGAGGACAAAGGCAGCTTCTGACACACCAGCCCCAGGACCTGGGGCGACTGGAGGAAGCCAGG
CGAGTGGGGCCCAGGACTGGTTCCAGTGAGAGAAACCAACCACAGGCACCCAAGCACTACCAGACAAAGCGTATTAAACAGAACACTTTTGAAAAAA
AAAAAAAAAAAAAAAAAAAAAA
HUMAN SEQUENCE - CODING
ATGAACTTGCTGCTCTCCTACCGCGATGTGCAGGACTACTCGGCCATCATTGAGCTGGTGGAGACGCTGCAGGCCTTGCCCACCTGTGATGTGGCCG
AGCAGCATAATGTCTGCTTCCACTACACTTTTGCCCTCAACCGGAGGAACAGGCCTGGGGACCGGGCGAAGGCCCTGTCTGTGCTGCTGCCGCTGGT
ACAGCTTGAGGGCTCTGTGGCGCCCGATCTGTACTGCATGTGTGGCCGTATCTACAAGGACATGTTCTTCAGCTCGGGTTTCCAGGATGCTGGGCAC
CGGGAGCAGGCCTATCACTGGTATCGCAAGGCTTTTGACGTAGAGCCCAGCCTTCACTCAGGCATCAATGCAGCTGTGCTCCTCATTGCTGCCGGGC
AGCACTTTGAGGATTCCAAAGAGCTCCGGCTAATAGGCATGAAGCTGGGCTGCCTGCTGGCCCGCAAAGGCTGCGTGGAGAAGATGCAGTATTACTG
GGATGTGGGTTTCTACCTGGGAGCCCAGATCCTCGCCAATGACCCCACCCAGGTGGTGCTGGCTGCAGAGCAGCTGTATAAGCTCAATGCCCCCATA
TGGTACCTGGTGTCCGTGATGGAGACCTTCCTGCTCTACCAGCACTTCAGGCCCACGCCAGAGCCCCCTGGAGGGCCACCACGCCGTGCCCACTTCT
GGCTCCACTTCTTGCTACAGTCCTGCCAACCATTCAAGACAGCCTGTGCCCAGGGCGACCAGTGCTTGGTGCTGGTCCTGGAGATGAACAAGGTGCT
GCTGCCTGCAAAGCTCGAGGTTCGGGGTACTGACCCAGTAAGCACAGTGACCCTGAGCCTGCTGGAGCCTGAGACCCAGGACATTCCCTCCAGCTGG
ACCTTCCCAGTCGCCTCCATATGCGGAGTCAGCGCCTCAAAGCGCGACGAGCGCTGCTGCTTCCTCTATGCACTCCCCCCGGCTCAGGACGTCCAGC
TGTGCTTCCCCAGCGTAGGGCACTGCCAGTGGTTCTGCGGCCTGATCCAGGCCTGGGTGACGAACCCGGATTCCACGGCGCCCGCGGAGGAGGCGGA
GGGCGCGGGGGAGATGTTGGAGTTTGATTATGAGTACACGGAGACGGGCGAGCGGCTGGTGCTGGGCAAGGGCACGTATGGGGTGGTGTACGCGGGC
CGCGATCGCCACACGAGGGTGCGCATCGCCATCAAGGAGATCCCGGAGCGGGACAGCAGGTTCTCTCAGCCCCTGCATGAAGAGATCGCTCTTCACA
GACGCCTGCGCCACAAGAACATAGTGCGCTATCTGGGCTCAGCTAGCCAGGGCGGCTACCTTAAGATCTTCATGGAGGAAGTGCCTGGAGGCAGCCT
GTCCTCCTTGCTGCGGTCGGTGTGGGGACCCCTGAAGGACAACGAGAGCACCATCAGTTTCTACACCCGCCAGATCCTGCAGGGACTTGGCTACTTG
CACGACAACCACATCGTGCACAGGGACATAAAAGGGGACAATGTGCTGATCAACACCTTCAGTGGGCTGCTCAAGATTTCTGACTTCGGCACCTCCA
AGCGGCTGGCAGGCATCACACCTTGCACTGAGACCTTCACAGGAACTCTGCAGTATATGGCCCCAGAAATCATTGACCAGGGCCCACGCGGGTATGG
GAAAGCAGCTGACATCTGGTCACTGGGCTGCACTGTCATTGAGATGGCCACAGGTCGCCCCCCCTTCCACGAGCTCGGGAGCCCACAGGCTGCCATG
TTTCAGGTGGGTATGTACAAGGTCCATCCGCCAATGCCCAGCTCTCTGTCGGCCGAGGCCCAAGCCTTTCTCCTCCGAACTTTTGAGCCAGACCCCC
GCCTCCGAGCCAGCGCCCAGACACTGCTGGGGGACCCCTTCCTGCAGCCTGGGAAAAGGAGCCGCAGCCCCAGCTCCCCACGACATGCTCCACGGCC
CTCAGATGCCCCTTCTGCCAGTCCCACTCCTTCAGCCAACTCAACCACCCAGTCTCAGACATTCCCGTGCCCTCAGGCACCCTCTCAGCACCCACCC
AGCCCCCCGAAGCGCTGCCTCAGTTATGGGGGCACCAGCCAGCTCCGGGTGCCCGAGGAGCCTGCGGCCGAGGAGCCTGCGTCTCCGGAGGAGAGTT
CGGGGCTGAGCCTGCTGCACCAGGAGAGCAAGCGTCGGGCCATGCTGGCCGCAGTATTGGAGCAGGAGCTGCCAGCGCTGGCGGAGAATCTGCACCA
GGAGCAGAAGCAAGAGCAGGGGGCCCGTCTGGGCAGAAACCATGTGGAAGAGCTGCTGCGCTGCCTCGGGGCACACATCCACACTCCCAACCGCCGG
CAGCTCGCCCAGGAGCTGCGGGCGCTGCAAGGACGGCTGAGGGCCCAGGGCCTTGGGCCTGCGCTTCTGCACAGACCGCTGTTTGCCTTCCCGGATG
CGGTGAAGCAGATCCTCCGCAAGCGCCAGATCCGTCCACACTGGATGTTCGTTCTGGACTCACTGCTCAGCCGTGCTGTGCGGGCAGCCCTGGGTGT
GCTAGGACCGGAGGTGGAGAAGGAGGCGGTCTCACCGAGGTCAGAGGAGCTGAGTAATGAAGGGGACTCCCAGCAGAGCCCAGGCCAGCAGAGCCCG
CTTCCGGTGGAGCCCGAGCAGGGCCCCGCTCCTCTGATGGTGCAGCTGAGCCTCTTGAGGGCAGAGACTGATCGGCTGCGCGAAATCCTGGCGGGGA
AGGAACGGGAGTACCAGGCCCTGGTGCAGCGGGCTCTACAGCGGCTGAATGAGGAAGCCCGGACCTATGTCCTGGCCCCAGAGCCTCCAACTGCTCT
TTCAACGGACCAGGGCCTGGTGCAGTGGCTACAGGAACTGAATGTGGATTCAGGCACCATCCAAATGCTGTTGAACCATAGCTTCACCCTCCACACT
CTGCTCACCTATGCCACTCGAGATGACCTCATCTACACCCGCATCAGGGGAGGGATGGTATGCCGCATCTGGAGGGCCATCTTGGCACAGCGAGCAG
GATCCACACCAGTCACCTCTGGACCCTGA

[0293] TABLE III

MOUSE NOMENCLATURE
ICSGNm Fosb
Celera mCG4848
HUMAN NOMENCLATURE
HGNC FOSB
Celera hCG20725
MOUSE SEQUENCE - GENOMIC
CTCACTCCGCCAGTCTGAAGCATCCGGGCTCTGTCTGTGAAACAGTCCGCGAACTGGGAGGGTCTACCCACTGGCCCCAGCACCCCTCCTCCCAAGG
CCCCCCATGCTGCTGCTTCATGTGACCAGGGCTGGGCCGAATCTCTGAGCAGACAGAGAGAAGCATGGTGTGACCGCATGAGTGGAGTGAGTTCTGG
GGACAGTGCCCAGTTGTGCGATAGACAGCAGATTCCGGAGGACCACTGTGCATGTGTGTGTGTTGTTGTATTTGGTTTGTGTTTGTGAGTATGTCTG
TGTGTGTGTGTGTGTGTGAGAGAGAGAGAGAGAGAGAGAGAGAGAGACAGACAGACAGACAGAGACAGAGACAGAGACAAAGAGAGTTGTGTGAGGA
CCACTGTGCATGTGTGTGTGTTGTGTGAATGTTTGTGAGTGTGTGTGTTGTTGTATTTGGTTTGTGTTTGTGAGTGTATCTGTGTGTGTGAGAGAGA
GACAGAGAGACAGAGAGAGAGAGAGAGAGAGAGAGACAGACAGACAGACAGACAGACAGAGAGACAGACAGAGAGAGACAGAGAGAGACAGAGAGAG
AGAGAGAGTTGTGTGAGGGCCTCCCAGGTGATCTGGGAAGCTTGTGAATGTGAAAGTGCCTGTGGGTGGCTTCACCTCTGGCAGAGGCATTCTGCCT
CCTGTATATTAACTATGTGTGCTCAGACAATCCACTCAAAGATGCTCTGGGGCTGCAGCTGATAGAGCAGCTTACTTAGTGTGCACAAGGCCGTGGG
TGCAAACACCCCAGAACTACAATCCCAGAACTCTCTCTGCGCACTGAACTCGACTTCCTCATTTGTTTCTTGTTTCTTTTTTTTGACGGAGTCTAAC
ATTGTCCGGATTGCTTCAAACTTTATAGCGGAGGAAGATCGATGGCAATTCTTCTGCCTCCACCTTCTGAGTGCTAGGATTGCAGGCATGTACCCTC
ATGCCCAGTTGAGACAGTATCAGTGATTGAACCCAGGGCCTCACGCCTCCTGGAGAAGCCCTGTACCATGGAGCTACAAGTCTAGTTCCTTTTCTTG
TCCTTAAAAAAAATAAAAAGCTGGGTCTTCTTATAGCCCAGGCTGGCTTTGTACTCCCCATCCTCCTGCCTCAGCCTCCCAAGTGCTGGGATGATAG
GCTTATGGCACGGCCATGATAGCACCTACAATTTCCAGAGTTGCCTGTCCTTTGCAGTGTACTATGCCTTGTGAGGGACAGGCTCTGAGGGTCTGCT
TGTGATCACACACCTGAGGACCTGTTTGCTGGGAGTTCTGTCCCCATTTCTTTGCCAGGCTGGAAGACACTGACACACCCACCATGGTGACAGTACC
CATGGACTTAAATGGTGTGACTCCCTCTGCTCTAATGGGAGGGTCTCAGTGCCCCGTATCTGCTGTTTCTCAAATGGGGTAGGTAATACAGAGATAG
GAGGGCTGACACAAAACATATCAAACACCAAGATAGCAAAGGCTAGAATGAGACCCTGTCTCAAGCTTTCCCATAGAGAAGGGGAGTGTATAATTGC
ACCCACTCACAAGACTGTTGGCCATAAACAAGTTTGTATGGAAAATGTTTACAAAGTGCTTGGCACATCCAGGGGTGGTGGCGCACACCTGGATTCT
CATACTTGGAGAGAAGAGCCAGGAAGATTAGGGACGGTTCCAGTCAGGCCTACATATTGAGACCTTATCTCAAAAACAAAACAACACAACACACACA
CACACACACACACACACACACACCTCAAAAACCTCTGGAAGTTCACATTTTGGGAAAGGCATCTGAATGGTAAAGTGTAGGGATTAAGAGTAGAGAC
TAGAGTCCCTCCATGGGACCGAGATGTAGAAAAGAAAGAAAAGAGAGCTTGCTAAAGCAGGCCAGCCTAAGGGCAGACTCCTGAAAGGACTTGCTCC
AAATGATTGTTGAGGGTGGAGGACTCTAAGAAACTGGAATTGTGGGAAAAACTCTCGGGGAATGACAAAAGCCGGTTTGCAGGTTGGTGAGATTAGA
AAGTAATGGCCACAATATAGGGCACAATATACAGGCTGGTCTTGAACTTGTAATCCTCCTGCCTCAACCTCCCAACTATTATAGGTATATGTCACCA
GCTGGATGCTTTTGCCTGTCTTGTTTCTTTCTGTGCCCCAGGGCTTCAGTGAATAGGGATGGCTGCCGATTAAATAACTGAATTGCTAGCAGGGTGG
GTGAGTCAGGGCTTTAATCCCAGCCTTCAGGAGGCAGAGGCACACAGATCTTTGTGAGTTCGAGGCTAACCTGGTTAACAGAGAGAGTTCCAGGACA
GTCAGAGCTACACAGAGAAACCTTGGCTCAAAAAACAACAAAATATCTGAATGGCTGATTGAATGACTGGGCAGATGGACAGATAGACAGATGGACA
TGTACGATCCACAGACATGTACGATCTTTGGGATGGTGGGGAAGGCTTGGTAGCTAACACAGGCTGGCTCAAGACCTGCTTCTGGGAACCCTTTCTT
TCCTTTGTATCCTCAGCTCTGGGTCATGAAGGGTGTGGAGTGGGCCGGGAAGGGAGTGTCAGGCTCAGTGGCTGCTTGCCTTGGATTCTGGCCCAGA
GTGTCTGGAGGAAGAAGAGGGTATCTCGGCATCTGAGTCACCTTAGAGAAACCCTAGCCACATACCTGACTTCTGACATCACACAACCAGGGCAACC
CTGGTGGCCGAGACAAGGAGACTGAATCATGGACTGAAATCAGTCACCTTGGGCATGGGCACGTGGCCGCTAGTGACCCCCTGAGACACCCCCGAGT
GGCTGTCTGGCTGTGTGGGCATGCAAACCACATCAAGGTCAGTAAAGGCTCTCCAGCCTGAGTCAGGGACAGGGTGGCCACTGCCAGAGACCACCGA
CCACAGCATCTGCAGGACAGGAAGAGAAAGTTGAGGGAGAAAAGGCAGAGGGTAGGCCCCAGTCAGGGAGAGGGAAGTGCCTGTGGGAGAAAGGGGA
AGCTGTGGCTTGCGGCCAGTAGCCTGGTGACCTGTGGCTGGGATGTGGAATGGGGTCTTAGTGTTTGCGCACAGAATGGCGAAGTTGCAAGCGAGGC
TCAGAGGACAATGGAGTCAGCAGACAATGGGCTCTTACACTTGCACACGCAGGCACAGGCGCACAAAAGCCAGCGTGGGAGCCCTACCCTCCAGCCA
CCCCAGAGCTACAGCTTGCCACACACACAC2AGACTGTCCCCACAAGACTCGCTTCCTTTACCCTATTAAGTGACATCCGTAATTCTCATTGTGAAG
ATTGCAACTCTCGGTATTTTGATGATCTCATTTGATATGAATAACTTAGACATTTGCAGTGCCAGGCACTGTTGTAGACTATTTAGCTGTGCTAGGG
ATTGAACCCAGGGCTTCTTGCATTCTGGGCAAACATCCTGCCACTGAGCTTGCTCCCAGACCCACGTGCCCATGGTTTGTCCCCAGACCCCTGTTTT
ATATGTAATTCTGAGACAAGGTCTCACTGTAATGCCCAGAGACCCTTGAGCTCACTCTATTACCCAGCCTTGAACTCACTGATCCTTCTGCAGGGAT
TGTAGGCATGACTAGCTAGACACAGCTAAGTATCTGTTAGAGCGTGTATGTGTACCTTGGGGCAGACATCTGTCCAACTGTATATGTCTATACATTG
TTAGGTTTCAAACAAATGGCTGAGGTGCCTATTTAACATATCAAGAGGACCTGGCCCCCAATTTCTCCCTGCAATAACTCAGCTCCTATATGCCCTC
CTGGCTGGCATACCCCACCCGCTATGCTGAACTTCTCCAGCCCAGGGGCTGGGCTGTTCATCCCTATGTAATCCAACTATTTTAGCTCTCCCCTCTC
TTTGTACCTTAAGGCTGCACCTGGCTCCCATGGCTCCCCTCCCTCTCTCCCCACACGGCTCAGGGTTAAGTCGACTCTGGACTATCCTAGAGGTCCC
TGCCTCTGGCTATGCTCTCCCACATATCTATAATAAACTCTCCTCTGCATACCTAGGAACAGTCATGTTCCCTTCCTTTCTCTTTCTTAATTTCCTT
TTCTTTTCATTCATACATACGTTTCTTTGGATTCTGTATTCTATTCTCCCTCCTTAAAAATATACACAGCTAGCCAGGCATGGTGATGCACACCTTT
AATCCCAGCACTCGAGAGGCAGACACAGGTGGATCTCTGTGAGTTCGAGACCAGCCTAGTCTACAGATTGAGTTCCAGGCCTGTCTGGCCTATACAG
TGAGATCCTCAAAAAGAAAAATGTACACACACTACCCCCTTCAAGTCAGAAGACCCTGAGACACAAGCCCATCCATCGCCGGGCAGCATGGGAAAAG
CAGGTTGTTACAAATGCCTGGAGTCAGGTCTGACACTCACACACAAGGTCCCTGCCACCAGTTGATCCAGCAGCTACATTCGAAGGATCAGAGAGGT
CCAGATAACTGTGCTGCCCTGTCAGACCTTATGAATGAAGACCTGAATGGAGGCTGATGTCTGTAATTCCAGCACTCGGGAGGCACTCAGGAGGCAA
GGAGGATTGGAGGGAGTTAGCTGGAGGCCAGCCTATGCTATAGAGTAAGACTGCTTCAAACAAGAGAAATGAGAACTGAAAAGATTGCTCAGTGGGT
AGAGGCGCTTGCCTGCAAGTCTAAGGAACTGAGTTCAATTCCTGACATTTGCATGATGGAAGAAAAGAAACTCCTTCAAGGTCACACACACACACAC
ACACACACTCAAAGAAGTAAAAATACTTTTTAATTTAAAAGAACAGAGAAACTTGAACACATGGTCGGTCTGCGATGTGGCTCTGCAGTAATGCCTG
CCTTGGATGTATGTAGTCCTGGTTTTGACCCCACCATTATACAGACCAGGTGTGGTGATACAAACCTGTAATTCCAGCACTGGGGGCTGGAGCCAAG
ACGATGGGAGAAGTTCTAGGTGGCTCATCCTTGGCTAAAAAAACATAGCCTGAGCTACCTGACACTGGTTGCTAGTGTGAGCTATCTGAGACTCTGC
CTCACAAATAATTAAGTAAAAATATGGTAGATTCATGACGACAGCACCTACAGATTGCCTGTCCTGTGCTGGGACACAGGGCAGCTTCACACTAACC
CTGATGGGAACACCTGGGAGACGACATGCTTGTTGCAAGGCGCTGGCTCATCTGAGACCAAAGCGACTTCAGGAGCCAAGTAGACCAGAATCCGTGT
GGTTCAGACAGTGGGAAGGGCATACAGAAACCTCAGGAACTGAGGCACAGCAGGGAGATGGGAGGCTGGGACAAGGGACCACTGACAGACACCATAC
ATCATACCATCTTGTCCCTCTGAATCTCCATGGGCACCCCCTCTGGGAGGACTCCAGGACTGCAAGCAAAGGTTAACTGAGTCAGCCAATTCAACCC
TGGCCTAGGGGGTGGAGGCAGGGGGTCTATCAGCGCGAGGAGACAGGACAAGGACACTCATGTATTGCCATAGGGATGGCTCTCTTGTCAAACCATC
AGAACACCCACAAACATCCCGGCTCACAGGGGTCTGCAGGGGTAGGGCTGGGATGTGGCCCGAGACTTGTGGGAACTGAGGAATGTAGTGGCAAAAG
TTTGGCCAAGGGAAGACCAGAGGACTCTGTATGCATGAAGGCCAGGGTGATGACATTTCAGGAAAGAAAAGCACAGAATCAAGCATGGTAGGTAGTT
GGAAAGTGGAAGCGGGNNNNNNNNNNNNNNNNNNNNNNNNNNNNNNNNNNNNNNNNNNNNNNNNNNNNNNNNNNNNNNNNNNNNNNNNNNNNNNNNN
NNNNNNNNNNNNNNNNNNNNNNNNNNNNNNNNNNNNNNNNNNNNNNNNNNNNNNNNNNNNNNNNNNNNNNNNNNNNNNNNNNNNNNNNNNNNNNNNN
NNNNNNNNNNNNNNNNNNNNNNNNNNNNNNNNNNNNNNNNNNNNNNNNNNNNNNNNNNNNNNNNNNNNNNNNNNNNNNNNNNNNNNNNNNNNNNNNN
NNNNNNNNNNNNNNNNNNNNNNNNNNNNNNNNNNNNNNNNNNNNNNNNNNNNNNNNNNNNNNNNNNNNNNNNNNNNNNNNNNNNNNNNNNNNNNNNN
NNNNNNNNNNNNNNNNNNNNNNNNNNNNNNNNNNNNNNNNNNNNNNNNNNNNNNNNNNNNNNNNNNNNNNNNNNNNNNNNNNNNNNNNNNNNNNNNN
NNNNNNNNNNNNNNNNNNNNNNNNNNNNNNNNNNNNNNNNNNNNNNNNNNNNNNNNNNNNNNNNNNNNNNNNNNNNNNNNNNNNNNNNNNNNNNNNN
NNNNNNNNNNNNNNNNNNNNNNNNNNNNNNNNNNNNNNNNNNNNNNNNNNNNNNNNNNNNNNNNNNNNNNNNNNNNNNNNNNNNNNNNNNNNNNNNN
NNNNNNNNNNNNNNNNNNNNNNNNNNNNNNNNNNNNNNNNNNNNNNNNNNNNNNNNNNNNNNNNNNNNNNNNNNNNNNNNNNNNNNNNNNNNNNNNN
NNNNNNNNNNNNNNNNNNNNNNNNNNNNNNNNNNNNNNNNNNNNNNNNNNNNNNNNNNNNNNNNNNNNNNNNNNNNNNNNNNNNNNNNNNNNNNNNN
NNNNNNNNNNNNNNNNNNNNNNNNNNNNNNNNNNNNNNNNNNNNNNNNNNNNNNNNNNNNNNNNNNNNNNNNNNNNNNNNNNNNNNNNNNNNNNNNN
NNNNNNNNNNNNNNNNNNNNNNNNNNNNNNNNNNNNNNNNNNNNNNNNNNNNNNNNNNNNNNNNNNNNNNNNNNNNNNNNNNNNNNNNNNNNNNNNN
NNNNNNNNNNNNNNNNNNNNNNNNNNNNNNNNNNNNNNNNNNNNNNNNNNNNNNNNNNNNNNNNNNNNNNNNNNNNNNNNNNNNNNNNNNNNNNNNN
NNNNNNNNNNNNNNNNNNNNNNNNNNNNNNNNNNNNNNNNNNNNNNNNNNNNNNNNNNNNNNNNNNNNNNNNNNNNNNNNNNNNNNNNNNNNNNNNN
NNNNNNNNNNNNNNNNNNNNNNNNNNNNNNNNNNNNNNNNNNNNNNNNNNNNNNNNNNNNNNNNNNNNNNNNNNNNNNNNNNNNNNNNNNNNNNNNN
NNNNNNNNNNNNNNNNNNNNNNNNNNNNNNNNNNNNNNNNNNNNNNNNNNNNNNNNNNNNNNNNNNNNNNNNNNNNNNNNNNNNNNNNNNCCACATT
TACTAAGCCCCTCCCTGCCAAAGTAAGCAATAAATTATGGCTAAGAGTCTCCCCACTCCTAAGATGGAAAGATGCCAAGCTGCAAAGGAGATCCTGA
CAACAGACCAGCTACTTGGAAGACTCAGAACCTAGCCAAGCTGCCTGCAAGAGGTTTAGACCAACTAAGACATCTGGAGAGAGCACCCTCCAATCTG
TGGAGCAGTCTTCAGGCTGTGCAGGGTGCTCCAGGCTCCCAGCTTTGTAAGCTGTCACTCATGCTGGGGCGGGCTTGGGTGACGCAGCTGTCTTTGA
GTGACTTCTCCCGTAAGTCACCCCTCACCCATGCACACTCCTGTAAGTAACTCTAATAGAAAATTCATCGGTTCAGCAAATTGGACTTTGGTCTCTT
CTGAGCTGGCTCCCTGTCTAGGGTGAATGGACATGTGTGTGTGGCATCTCCCCTGGAAAAGTTTTCTTTCCCTAGGCTTGGCCTGGGGTCTCCCAGG
CTTTTTGCAGTTGCTGGTGGCATCCTTCTTAGTGGGTACTTAAGAATCAGGACCCTGGCCAGCGATGCAGCAGCCGTTGGCAGAGGGCTCCCCTAGC
ATGCAGGAGGCCCCTGGATTACATCCCCAGTAATAAACCAGGCCTGGCGACAATATAGAGGTGAGAGCAAGATGTTCATTGTCATCCTTGGGTACAT
AGTAAATTCTAGTCTTTGTTTTAAAAACAAACAAACAAACAAACAAGCAGGACATAAGATCAGATATGCCTGGCATGGTGGAAGGTGCCTTTAACTC
CAACACTCAAGAGGTAGAGGTCATCCTGGCCTACAGAATGAATTCCAGGCCAAAGGTGGTACATAATGAGACCCCATCTCAAAAACAGACAGAGAAA
GGAGGAGGGGAAAGGGTAGAAAGAGGAGGGGATGTTCACAATAGGGGGAGGGGATGTTCACAATACGTGTATATATATTCTTTCCTTCTGGATGTGG
ATAGAACCCAGGACTTCACACATGCTAGACATTCATTCCACTTTAAGCTACATTCCCGCCCTCACATCCCCTTTTGTTTAAATCATTAATATTGATA
TTATTATTATTATTATTATTATTATTATTACTACATATGAGTACTGGTTGTTTTCTGTCTTTGCATGCATGTGGAGATCAGAGAACAATTTTTAGGA
GTCATTTTTCTTCTTCCACCGTGAGTCCCAGGGATGGGACTCAGGTTGTCAGGTATGTGTAGCAAGCTCCTTTACCTGTGAACCATCTTGCTGGGGC
TGATACCTGCTGATTGCTAAACACATGCCACCGATTATATTAATGCACTAGTATTTTATTTATTTATTTTTCGAGACAGGGTTTCTCTGTGTAGCCC
TGGCTGTCCTGGAACTCACTCTGTAGAACAAGCTGGTTTCGAACTCACAGAGATCTCCCTGCTTCTGCTGGGATTAAAGATGTGTGCTGCTGCCGCA
GCTGCCACCACCACCAGACACCACCAATTATTATTGTTCAATTATTATTGTATACACACTTTCTTTTCTGTCTCCTGAGCTAAGTGGGAAGGAGAGG
CTTCCAACACCATCAAGCCTGAAGAACTCACCGGGTGTGGGTTCCTACCTGCTCCAATTCTGCAGGTCCCCCAGATTCAGGGACCCGGAAAAGCCAC
CTATCCTTTGCTTAGCTATGAGTACTGAAGTTTTAGATCAGGGAGGGAGCACATTTTCCAAGCTCACCGAGTCACACAGAATCCGTGACAAAGCTAG
TGGGGAGGGGACTGCATCCTTACCCATCCCTACACCTGGGGATATCACAGACTCTCCAATTCCCCCTGAGCCTCAGTTTCCCCACCTAGACTGATTA
TACCCCTCTCGCCAGAATCTGCACTGGGGACCTTGCTCTTTTTCACCAGCAGGGGCGCTGCACCGGTTTGGGGAGGGTGGGGTCCCAGGGGTATAAG
CAGACCTGGGATCTGGAGTTGCACCTTCTCCAACCCGGGTCAGCAGGGGCCTTCTGAGGGAGTTTAGGCGCCTGTCAATCTCAGCCTCCGGGACAGC
GTGGAACTGCGCAGGCGCGGGCGGGTTCCGCACAGCGCAACAGCGGGCGCGCGCGGGAGCGAGGGATTCCCTCTGACGTAATTGCTAGGATACCAAA
CAAACACTGGGCCGCGCTGGCCGAGCTCCTEATATGGCTAATTGCGTCACAGGAACTCCGGGGAGGGCGGGGCGGGATCCCCTCCCGCGAAGCCCCT
CAGAACGCAGCCTTGGGGACCCCCGAGACCCCCAGGGTCACACTATGGGCAGGTGGCAGGTGCACGAGGCCCTGGAGGGCGCCACAAGGAGCTCAGT
CGGCGGGAAGGGAGAGTTTGGGAGGTTTGTGCATGGAGTTGCGGGTGACGCAAGCGCGGGGGGCGGGTCCCGGAGGCATAAATTCAGCCCGGCAGCT
CTTGGAGGCCGTGAAAAATTTATATATATATATTTATATATATTTTTAAACTGGAGAGAAAGTTTTGTGGGTTTCCTTTTTGCAAGACTCTTTCTAG
ATCGTTCTTCCGATTCGTCCGGAGGATAGACTTTCTTTCTGTGGGCTTCTGGATCGCGCCCCTCTGCTCTCCCTCATTTCTTGGGACGCTTCGACAG
GATTGGAACTGCATCTGAAGCGCACGCTGCACCGCGGCACTGCCCGGCGGGTTTCTGGGCGGGGAGCGATCCCCGCGTCGCCCCCCGTGAAACCGAC
AGAGCCTGGACTTTCAGGAGGTACAGCGGCGGTCTGAAGGGGATCTGGGATCTTGCAGAGGGAACTTGCATCGAAACTTGGGCAGTTCTCCGAACCG
GAGACTAAGCTTCCCCGAGCAGCGCACTTTGGAGACGTGTCCGGTCTACTCCGGAGTCGCATCTCATTCCACTCGGCCATAGCCTTGGCTTCCCGGC
GACCTCAGCGTGGTCACAGGGGCCCCCCTGTGCCCAGGGAAATGTTTCAAGCTTTTCCCGGAGACTACGACTCCGGCTCCCGGTGTAGCTCATCACC
CTCCGCCGAGTCTCAGTACCTGTCTTCGGTGGACTCCTTCGGCAGTCCACCCACCGCCGCCGCCTCCCAGGTAAGTTCTAGATCGTAAAGATTCTAC
TTTAGTGGTTGGGGGGGGGTGTTTCTTTCAGGCTAAAGTGTAGATTGAGCATCCTCTCAAATAGAGACGCGCCAAAACCCAGGATCTGGGATTGCAA
TAGTTCGGTTTGCACTTTGGTTTTTTGTTGTTTGCAAACTGCAAAGAATGGAGTGATGTTTGCAAAAGGTTATTTGCGGGGAGCGCGGGAAAGGAAT
GCAGCTGGGCAAACGTTGGCGATGCCCGGTGCAAAGTATATACCCGGTGGTTAGCAGAAGCTGAGAACTTTTAGCCGAAAGCCGGCTCCCTAAGCCG
AAGCTAGGCAAGTAGGGGAAGAAAAAGAAACAAAAAATTCCAGAGAAGCTTCCAGGAGCCTCCTCCTCTTCCCTCTTCCTTCAAAACGCGGACTGCA
AGTCCGCAGTGACCCTCCACCCAGCAAGAGTTAGGGCCTCGAACCCCGGTCACGCTGCCTCCGCCTCCTGCGCGGAGACGTAACGGGGGACCCGTGC
GTAAAGGCTGACGCGCTGGAATCCTCCGTCTGACGCGGGGCACGCACAGCGCGCAGCGCCCCCTCCGCCCGCCCCGCCCCTGACGTCCCGGGCACGT
TCTATTTTGGAACGCCGAGGCCACGTTGCTAAGGGAGGGGGCAGCGTGGCTTTGTGATTGGCTGTCGCGGCGCGAGCTTTAGCCAATCAGCGTTCCC
TTCCTATTTGTAGAGCGTAGCTCCCTTCCTTGCTTTTTGTGGTTCTTCCCGTGCTGGGGGTCTCCAAGAGGGAGAGCTAGGGGATTCTTGTCGCGAT
CGGGGGACTCGTTGTCACCCCATGGGTCTGCGAGGACCTTGTGTGGACCTGGTCCTGTTGTCATAAGCTAGAGGCTTTTGGCTGAGTGTTAGCGCCT
CTAAGGGGGAACTGAAGGCCTCATCCCTTCTCCAGGCACACATATACGTGCTCCCTGAGCTCTAGACACTCAGTCCTTCCGAGGTGTTCAAACACTA
GATGAGCTAGCCTACGGAGAGGCAGCCAGGTGGTCTCTAAAAGGTCCGCCTTCCCTTAGTTCCCAGGGCTCTGATTGGCCAGGGATTCAGCCCTTCC
CTCGCCACGCCCCCTAGAGTAGTTAAGCCTCTAGGATTCCACTTGCGGGAAGGGGGGGGGGGGCGTGATGGACGGTTCTTGGGTTCGGGGACGCAGA
TCCTATGTCACCCCATCCCCTGCAAGACAGTCTGAGAGATTCTCGCTGTCACTTTTCTCTGCCTATCAGTTCACTGAAACCTGTCAGTCTCACTGGG
GAAGAGACAGACACTCGGAAGGGATGCTCTCAACTGTTAGGCCGGTCCCCCAACACCGTTGGAACTGGGATCTCCGCCCCTGCGGGAGCCCTCATGC
AGTGGGGGGTGTGTTTGTGTGTGAGTGGAGGAGAGGAAGGCTTGGGCTAAGGCCTCTCCCTCTCCCTACCTACTGTGGTGGGGGTGGGGTGTTTTGG
CTGTATGTGTGTGTGANNNNNNNNNNNNNNNNNNNNCTGACTTGAAGGGGGTAGTGTGTGTACATTTTTCTTTTTGAGACAGGATCTCACTGTATAG
GCGAGACAGGCCTGGAACTCAATCTGTAGACTAGGCTGGTCTCGAACTCACAGAGATCCACCTGTGTCTGTGGCTCCAGTCCCGGGATTAAAGGTTT
GCATCACCAGGTTCTGTCCAGCCTCCGTCTCCCAGCCACCCCCCCACACCTAAGAGTCACCAACCCGGGGTGTGATTCACCACCCGCTGGAACCGTG
CAACCTTTCCCCGAGGAAGAAGGAGGAGGTAGAAGGCAGTTGAACAGAATCTCTCATTAACCACTGCGTCACGGTGTAGTGGAAGGGTGGGTGTTGT
GGCTTTTTGCCTGTGACACACACATCCACACCCGCTCACCCTGTGCTCACTCACAGGGGTCGGTGTGTGTTATGTGTGTTGGGCGTGTGTGTGTCGG
TGGCTTTGTTTGTGTGTCTACGCGTGTGTGTGTATGTCTCACCCCGTAGGAGTGCGCCGGTCTCGGGGAAATGCCCGGCTCCTTCGTGCCAACGGTC
ACCGCAATCACAACCAGCCAGGATCTTCAGTGGCTCGTGCAACCCACCCTCATCTCTTCCATGGCCCAGTCCCAGGGGCAGCCACTGGCCTCCCAGC
CTCCAGCTGTTGACCCTTATGACATGCCAGGAACCAGCTACTCAACCCCAGGCCTGAGTGCCTACAGCACTGGCGGGGCAAGCGGAAGTGGTGGGCC
TTCAACCAGCACAACCACCAGTGGACCTGTGTCTGCCCGTCCAGCCAGAGCCAGGCCTAGAAGACCCCGAGAAGAGACAGTAAGTATGAGGCCTCAG
GAGTTGGGATGGAGGAGCGTAGCTAGGGATGTGGGCTCAGTTTGTACAGTGCTTGCTGCCATGCATGAAGATCCCTAGCACAGCATAAGCCAGGAGT
GGTTATGCAGACCTGTAACCCCAGCTCTCAGAAGGTGGAGGCAGGAGGAGCAGGAGTTCGAGGCCAGCCTGTGCTACTTATGGAGTCCAGCCTGCAC
TGCAAGAGATCATTATTTTCAAAAGTTGGCCTTGGGGGGAGGTGGGTGAGGGAAGTAAGAGAAAGTGACAGTAATTTTATCACTTAATAGTTGGAGG
TTCCTCTGAGGCCTCAAGTCTGAAGGAACTTTACCATTCTGGCCAGTGAGGAGTAGGGGTTATTATTTGGGGTTCAGGAGGAAGGAGTTTTCTTAGG
GCTGATAGAGGTACCCCCAGATCTCATGGTCCTTATCTCTGACTCAGCTTACCCCAGAAGAAGAAGAAAAGCGAAGGGTTCGCAGAGAGCGGAACAA
GCTGGCTGCAGCTAAGTGCAGGAACCGTCGGAGGGAGCTGACAGATCGACTTCAGGCGGTAAGGAGGAGTCTGGGGGTGTCTTGAGGCCGTGCTGGG
AGCACTCTGCCTTGTTCTTCCCCCGTTTCTCACTGTGCCTGTGTCCTAAACGAGGAAACCCCCTCTTAGGGAACAGGGGTCAGTATAGGCTGATGGA
GTGGCTCCATATGCATGCTCAGACCCATGCCCACTTACTTTCGACTGTTCCCCACTTTCCCTGAATATGTCCCCACATGTCACCCTCCTGGCTTTCT
CTCAGCCTAAGGAGACAAGCTGGAGGAGGTAATTCTCTCACCTTCTTTCCTTCACTAAATAATAATCCATTTTGCCTTCCTGCCTCCATTTTTTTTT
CCTGAGCTGGGGATCTACCTGTGTAGTTCAGCCCTCCTCCCCCAACTTGATAGCCTCAAGTTTCAGCCCTTGGCTGAGATGCCATCATCCTGACTGG
CTCTGGCTGGAAACTATTTTGTGCTAAGTCAATTCCTTACCTGCTACTCCAGCTATCTACAGTTCTGCCGAACTTGAGCTGGTGGCGCCCACCAAGC
CCACTTCTTTCTCTCTTCTACCTCAGTGCAACCCCCACACACACACACACACCTCATGCCTGCCCCTTGAAACCAGGGTGTGTCTCTGATTTCCCGT
CGGGAGGCTGAAGGAGATGGGTAACAGAACCTCATTAAAAACAACACATAAGCATTACCTACTGACTCAACAAACTGTAGTGTTTTTCTTTTTTCCT
CTCAAAAAATTATTTCGTTTGTTTATTTATTATTTGCTTATGTTTGAGTGAGTGCTGGTGCACCACAGCACACATACGAGGTCAGAGGGAAATTTTC
ATAGTTTGTTCTCTCCTTCCGTGTTGTGGGTGCTTGCTGGCAATCTCCTTCACTCAGTGAGCTACAATGCCCCCTTCTGCCCTTTAAGGCAGAGTAC
TCCTTAGTACAGGGGGACCCTTTCCTCGGCCTGTCAAAGTTGAGATTACAAATGTTCACCATCACACCAGGCTTGGAGTTCTTGCCTATCAGTGACG
TCCACTCCTGCCTAGCTTCTTCCCAACCATCTCTTAGTCTGATGGGGAAACCGAGGCACGAGTAGCATGGTCTACCAGGATTTCCTGTTAGGGGACG
GTCCCCTCAGTTGGGAGGGAGCTGTCCAGCCCCCTGGATCAGCAGCAAGAATGTATGAGTGTGGGGTTGGGCGGGTGAAGCTACTCTGTGTGGTCGC
TGACCAGCAATTCTCCTTTCTCTGTCTCCTATGACCTGGCCCTGCTGGGATCCATTAGGAAACTGATCAGCTTGAAGAGGAAAAGGCAGAGCTGGAG
TCGGAGATCGCCGAGCTGCAAAAAGAGAAGGAACGCCTGGAGTTTGTCCTGGTGGCCCACAAACCGGGCTGCAAGATCCCCTACGAAGAGGGGCCGG
GGCCAGGCCCGCTGGCCGAGGTGAGAGATTTGCCAGGGTCAACATCCGCTAAGGAAGACGGCTTCGGCTGGCTGCTGCCGCCCCCTCCACCACCGCC
CCTGCCCTTCCAGAGCAGCCGAGACGCACCCCCCAACCTGACGGCTTCTCTCTTTACACACAGTGAAGTTCAAGTCCTCGGCGACCCCTTCCCCGTT
GTTAGCCCTTCGTACACTTCCTCGTTTGTCCTCACCTGCCCGGAGGTCTCCGCGTTCGCCGGCGCCCAACGCACCAGCGGCAGCGAGCAGCCGTCCG
ACCCGCTGAACTCGCCCTCCCTTCTTGCTCTGTAAACTCTTTAGACAAACAAAACAAACAAACCCGCAAGGAACAAGGAGGAGGAAGATGAGGAGGA
GAGGGGAGGAAGCAGTCCGGGGGTGTGTGTGTGGACCCTTTGACTCTTCTGTCTGACCACCTGCCGCCTCTGCCATCGGACATGACGGAAGGACCTC
CTTTGTGTTTTGTGCTCTGTCTCTGGTTTTCTGTGCCCCGGCGAGACCGGAGAGCTGGTGACTTTGGGGACAGGGGGTGGGGCGGGGATGGACACCC
CTCCTGCATATCTTTGTCCTGTTACTTCAACCCAACTTCTGGGGATAGATGGCTGGCTGGGTGGGTAGGGTGGGGTGCAACGCCCACCTTTGGCGTC
TTGCGTGAGGCTGGAGGGGAAAGGGTGCTGAGTGTGGGGTGCAGGGTGGGTTGAGGTCGAGCTGGCATGCACCTCCAGAGAGACCCAACGAGGAAAT
GACAGCACCGTCCTGTCCTTCTTTTCCCCCACCCACCCATCCACCCTCAAGGGTGCAGGGTGACCAAGATAGCTCTGTTTTGCTCCCTCGGGCCTTA
GCTGATTAACTTAACATTTCCAAGAGGTTACAACCTCCTCCGGGACGAATTGAGCCCCCGACTGAGGGAAGTCGATGCCCCCTTTGGGAGTCTGCTA
ACCCCACTTCCCGCTGATTCCAAAATGTGAACCCCTATCTGATTGCTCAGTCTTGCCCTCCTGGGAAAACTGGCTCAGGTTGGATTTTTTTCCTCAT
CTGCTACAGAGCCCCCTCCCAACTCAGGCCCGCTCCCACCCCTGTGCAGTATTATGCTACGTCCCTCTCACCCTCACCCCCACCCCAGGCGCCCTTG
GCCGTCCTCGTTGGGCCTTACTGGTTTTGGGCAGCAGGGGGCGCTGCGACGCCCATCTTGCTGGAGCGCTTTATACTGTGAATGAGTGGTCGGATTG
CTGGGTGCGCCGGATGGGATTGACCCCCAGCCCTCCAAAACTTTCCCTGGGCCTCCCCTTCTTCCACTTGCTTCCTCCCTCCCCTTGACAGGGAGTT
AGACTCGAAAGGATGACCACGACGCATCCCGGTGGCCTTCTTGCTCAGGCCCCAGACTTTTTCTCTTTAAGTCCTTCGCCTTCCCCAGCCTAGGACG
CCAACTTCTCCCCACCCTGGGAGCCCCGCATCCTCTCACAGAGGTCGAGGCAATTTTCAGAGAAGTTTTCAGGGCTGAGGCTTTGGCTCCCCTATCC
TCGATATTTGAATCCCCAAATATTTTTGGACTAGCATACTTAAGAGGGGGCTGAGTTCCCACTATCCCACTCCATCCAATTCCTTCAGTCCCAAAGA
CGAGTTCTGTCCCTTCCCTCCAGCTTTCACCTCGTGAGAATCCCACGAGTCAGATTTCTATTTTTTAATATTGGGGAGATGGGCCCTACCGCCCGTC
CCCCGTGCTGCATGGAACATTCCATACCCTGTCCTGGGCCCTAGGTTCCAAACCTAATCCCAAACCCCACCCCCAGCTATTTATCCCTTTCCTGGTT
CCCAAAAAGCACTTATATGTATTATGTATAAATAAATATATTATATATGAGTGTGCGTGTGTGTGCGTGTGCGTGCGTGCGTGCGTGCGAGCTTCCT
TGTTTTCAAGTGTGCTGTGGAGTTCAAAATCGCTTCTGGGGATTTGAGTCAGACTTTCTGGCTGTCCCTTTTTGTCACTTTTTTGTTGTTGTCTCGG
CTCCTCTGGCTGTTGGAGACAGTCCCGGCCTCTCCCTTTATCCTTTCTCAAGTCTGTCTCGCTCAGACCACTTCCAACATGTCTCCACTCTCAATGA
CTCTGATCTCCGGTCTGTCTGTTAATTCTGGATTTGTCGGGGACATGCAATTTTACTTCTGTAAGTAAGTGTGACTGGGTGGTAGATTTTTTACAAT
CTATATCGTTGAGAATTCTGGGTGGAAATGTCTGATCAGGAGAAGGGCCTGCCACTGCCGACCACAATTCATTGACTCCATAGCCCTCACCCAGGCT
GTATTTGTGATTTTTTTCATTTTGTTTTTTTGTATTTTGCACCTGACCCCGGGGGTGCTGGGGCAGTCTAGCACTGGGCAGCTCCCCTCCCCCCCTT
GGTTCTGCACTGTCGCCAATAAAAAGCTTTTAAAAAACTGTATTCTTCAGGTCAAAGTGTCTGTTTTCCCTGGACATCTACTACATGGCTTCCTTTC
AGAAAAACGGAGTTTGGATTGCTAGGGAGGTGTTGCTGGCACTTAGTGGGACGCCTAATGAATCAGAACCTACAACGGGACTAAAAGGAAGTGGAGA
CTTGCTAGGTTTTCCCATGTTCCCAGGCTGGGCCACCTACTTGAAAAAATAAGGGGCGGAAAAGTGTAAGGTACAAATTTGGTGAAGGGTCTGGAAG
ACTTCATGATCGGAAAAGAATTTATTCACCTTGGGTGTGCAATGACTTCAGCAACAGCTAAGGGCAAGGTGTAAAAGCTGGGCACACTTGTAAATCC
TAGCATTTGAGAGGTGGAGGCAAGGGGATCACTGGTGGAGTTCAGTGTCATGTGGATCGTAGATACCAAGCGCAAAGATCTGCTATGGGGAGAGGGC
TTGGTACACCAGGGGAGCCAGAAGTTCGTGGTGAGGGTAGTGGAGGGCAGGTGGAGAGTGAGAGTTAGCCTCAGGGAGATTCTACAGGCAATGATGC
AGAGTTCAGACGCTCCTTTGAAAGCACTAGAGAGCCGCAGCAGGTTTTGAGCAGAGAAGGTTAGCGTTAGGTGGTCTCTTCTAGCCCATCCCAGGCT
GAGGAGGACGCTGAGGGTTTCAAGAAGGATCGAGAATGGAAAGCAGAGGAGAAAAAGGATCCAAGAGGCATGGAGGAGGCAGAACACATTTCTCTTC
TTTAATAGCAAGCCTGGAAAGGATAACTTGCTGCAGGAGGAGATGCTCACCAGTCGGGTGGTCTAGGGGGTTCTTGGAAAAGAGAAGGCATTTGCTC
AAGCCTCGGTTCCCCCATTCTCGGTCTTCTGTCAGCTTGTCTTCCATTAAGTGTGTGTCTCAAGGCCACCCTGCTCAGGACTCCTTGTGAGACGACC
TTCTATGCTCGAGTTCATTAAAAACACAATTGCCTGGTGCCCTGCTCTCTCCACTGGCTCAGTTACCTCAAAAGACCAGGGCTAAAGGTGTGATCAC
AACTCTATCCCCATTACTGCTCCAACGCAGAGACAGGACTGAGCCGGAGTGAACAAATGAACAAAAATGACTAATAATGCATGCGTGATTAAATACA
TAAAAGAGCAGATGACTGGATGAGCAAATCGTTTAAGGAGAGACAGCAAGATCCTAGAATTTTGGAGACTAATTTAAATCCATCTTTGAGATGTATT
TGGTCGGAAATTCCTGGGAGGAAAAAAAGTGTAAGTATGAAGAGAGAATAAATGAGAATAGGGGTGGCTTCAGAGAGGTTAACTGCGCGCTGGTCGC
TTTTGTACAAGAATGTGAATTGCAGGGAGCAAAATGGGATAGATACTCCCGCCCGAAAGGTGGAATTGAACCACTCTGTCGCTAAACAGCTACAGGT
TTGAAGCCTGCACCCCAGACCACTGAGGATCATCCGGGCGAAAGGAGCTATTTTCGGTTAGTTATATAAAGGCCAGATACTACTACTTTTTTCACTT
ATGGTCATTATTTGTGGTATACAGTAGATAATTAATTTCAATGGTTTCGAACATTTTTTTTCACTTTTTCTTGTGAACATGTGTTTCCTCAGTAAAG
TGTTCCGTGAATGACTCTACTAACTAAAAAGTAAGTAGCTTCATTTGCATAGCGCCTTGCATTCTGGGAAGCAGCGCCTAAAGTGCCTGTCTCCCTA
ACTAAAAGCAGAATTTTTTGCAAAGTGAAAAGTCAGTTTTATTTTTGTTTGTTTGTTTGTTTGTTTGTTTTTAATGGAAAAACTTCTCACGCGGCCC
ATTCGTAGCAGAATTCGAGATTTTCTGCAAGCGAGACCGTAGGGTCTGACGGCACGCGGCCGCAGAGCGACACCTGCCGTTGCTTTATAGAACTGCA
AGTATGTAGGGAATCTACTGAGTCCCTAAGGTGATGGAGTTGACAACCAACTCCCCTTGCGTTTAGACGCTAAAAACCATCCCTTTTTATATCTATG
TGATTAGCCCAGGGAAACTAAGGCTCAGACATGGATAATACCACAGCCGAGTTCCTGTAGCCCAACTCCCTAGGGGAAATGAAACCTACAGTTGTGG
TTTTAATATGCTTGGCCCAGGGGCAGTGGCCCTATTGGCAGGAGTGGCCTTATTAGAGGAGGTGTACCTTGTTAGAGGAAGTGTGTCACTTGGAGGC
GAGGTTTTGAGGTACGTATGCTCAAGTCTGGCCAGTGTGATCCTGGCTGTCTGCAGAACGCGGTCTCCTGGCTGCCTTCGGATCAAGGTGTAGAACT
CTCAGCTCCTTCTCCAGCACCATGTCTGCCTGCTTAATGCTTTGCTTCTTTCCATGACGATAATGAACTGTGCCTCTGAAACTGTAAGTCAACCCCA
ATTACACAATTACATGTTTTCTTTTATAAGAGTTGCATATATATATATATATGTCACACTCTTTAGCTCTGGCTGGCCTGAAATTCACTATGTAGCC
CAGGATTGCCTGAACTTTGAAGCAATCTTCCTGCCTCAGCCTCCCAATGGTATTACAGGCATGAGTCACAACAAGCCATTTAAATCTTATGATGACT
TATAAGAAGACAGAAAATCAGAGTTCCTTTACCTAGTTCACAGATCCCTACAATCTAACCTCGTTCGCTCCATAAACAGCCCTACCCCACCCTCCTG
GAACTGCTTTGAGGAATGCTGCAGGCTCTCACAGGCACACTCCTCCTTGGTTAATCTCTTCAGCCTGGTTGCCTTCCCTCCCCATGTCCATGTGGCC
CAAAGCCTCTCATCCTGTTCTCAAATACCACTAGCTAGTAAGGCCTCCCCGACCTGACCCCGGTTTAAATATTAGAAAAGGGTCACTTTCTCCCCTG
CCACAGACAACCAAACCACCATATGCTTGTCACTTACTACCTGACTATGAAGGTGAATAGATGTCTTCACAACCTTTCTCTGAGCGTCAGTTTCCCC
ACCTGCATAATGCATCTGAGACACAGAATTCCCTAGAGCTGTGGTTCTCGTCATTCCTAGTGCTGGGACCCTTTAATACATTTCCTCATGTTGTGGT
GACTCCACCACCACCATAAAATTATTTTCATTGATACTTCATAACTGTAATTTTTTCTATTGTTATGAATAGTAATGTAAGCATTTGTGTTTCCCAG
TGATCTTAGATGACCCTGTGGAAGAGTCATTCCACCGCCAAAGGGGTCCCCACCACAAGTTAAGAATTCCTGCCATAGAGGAATCACAAGGAACCAA
TGAATTACACTTTGGGTCGACTTTTGGGCTGGCCTCTGGGAGGCGNNNNNNNNNNNNNNNNNNNNNNNNNNNNNNNNNNNNNNNNNNNNNNNNNNNN
NNNNNNNNNNNNNNNNNNNNNNNNNNNNNNNNNNNNNNNNNNNNNNNNNNNNNNNNNNNNNNNNNNNNNNNNNNNNNNNNNNNNNNNNNNNNNNNNN
NNNNNNNNNNNNNNNNNNNNNNNNNNNNNNNNNNNNNNNNNNNNNNNNNNNNNNNNNNNNNNNNNNNNNNNNNNNNNNNNNNNNNNNNNNNNNNNNN
NNNNNNNNNNNNNNNNNNNNNNNNNNNNNNNNNNNNNNNNNNNNNNNNNNNNNNNNNNNNNNNNNNNNNNNNNNNNNNNNNNNNNNNNNNNNNNNNN
NNNNNNNNNNNNNNNNNNNNNNNNNNNNNNNNNNNNNNNNNNNNNNNNNNNNNNNNNNNNNNNNNNNNNNNNNNNNNNNNNNNNNNNNNNNNNNNNN
NNNNNNNNNNNNNNNNNNNNNNNNNNNNNNNNNNNNNNNNNNNNNNNNNNNNNNNNNNNNNNNNNNNNNNNNNNNNNNNNNNNNNNNNNNNNNNNNN
NNNNNNNNNNNNNNNNNNNNNNNNNNNNNNNNNNNNNNNNNNNNNNNNNNNNNNNNNNNNNNNNNNNNNNNNNNNNNNNNNNNNNNNNNNNNNNNNN
NNNNNNNNNNNNNNNNNNNNNNNNNNNNNNNNNNNNNNNNNNNNNNNNNNNNNNNNNNNNNNNNNNNNNNNNNNNNNNNNNNNNNNNNNNNNNNNNN
NNNNNNNNNNNNNNNNNNNNNNNNNNNNNNNNNNNNNNNNNNNNNNNNNNNNNNNNNNNNNNNNNNNNNNNNNNNNNNNNNNNNNNNNNNNNNNNNN
NNNNNNNNNNNNNNNNNNNNNNNNNNNNNNNNNNNNNNNNNNNNNNNNNNNNNNNNNNNNNNNNNNNNNNNNNNNNNNNNNNNNNNNNNNNNNNNNN
NNNNNNNNNNNNNNNNNNNNNNNNNNNNNNNNNNNNNNNNNNNNNNNNNNNNNNNNNNNNNNNNNNNNNNNNNNNNNNNNNNNNNNNNNNNNNNNNN
NNNNNNNNNNNNNNNNNNNNNNNNNNNNNNNNNNNNNNNNNNNNNNNNNNNNNNNNNNNNNNNNNNNNNNNNNNNNNNNNNNNNNNNNNNNNNNNNN
NNNNNNNNNNNNNNNNNNNNNNNNNNNNNNNNNNNNNNNNNNNNNNNNNNNNNNNNNNNNNNNNNNNNNNNNNNNNNNNNNNNNNNNNNNNNNNNNN
NNNNNNNNNNNNNNNNNNNNNNNNNNNNNNNNNNNNNNNNNNNNNNNNNNNNNNNNNNNNNNNNNNNNNNNNNNNNNNNNNNNNNNNNNNNNNNNNN
NNNNNNNNNNNNNNNNNNNNNNNNNNNNNNNNNNNNNNNNNNNNNNNNNNNNNNNNNNNNNNNNNNNNNNNNNNNNNNNNNNNNNNNNNNNNNNNNN
NNNNNNNNNNNNNNNNNNNNNNNNNNNNNNNNNNNNNNNNNNNNNNNNNNNNNNNNNNNNNNNNNNNNNNNNNNNNNNNNNNNNNNNNNNNNNNNNN
NNNNNNNNNNNNNNNNNNNNNNNNNNNNNNNNNNNNNNNNNNNNNNNNNNNNNNNNNNNNNNNNNNNNNNNNNNNNNNNNNNNNNNNNNNNNNNNNN
NNNNNNNNNNNNNNNNNNNNNNNNNNNNNNNNNNNNNNNNNNNNNNNNNNNNNNNNNNNNNNNNNNNNNNNNNNNNNNNNNNNNNNNNNNNNNNNNN
NNNNNNNNNNNNNNNNNNNNNNNNNNNNNNNNNNNNNNNNNNNNNNNNNNNNNNNNNNNNNNNNNNNNNNNNNNNNNNNNNNNNNNNNNNNNNNNNN
NNNNNNNNNNNNNNNNNNNNNNNNNNNNNNNNNNNNNNNNNNNNNNNNNNNNNNNNNNNNNNNNNNNNNNNNNNNNNNNNNNNNNNNNNNNNNNNNN
NNNNNNNNNNNNNNNNNNNNNNNNNNNNNNNNNNNNNNNNNNNNNNNNNNNNNNNNNNNNNNNNNNNNNNNNNNNNNNNNNNNNNNNNNNNNNNNNN
NNNNNNNNNNNNNNNNNNNNNNNNNNNNNNNNNNNNNNNNNNNNNNNNNNNNNNNNNNNNNNNNNNNNNNNNNNNNNNNNNNNNNNNNNNNNNNNNN
NNNNNNNNNNNNNNNNNNNNNNNNNNNNNNNNNNNNNNNNNNCTTGGATTACAAACATGTGCCACCAAGTCTGGCTGCCCATTATGCATTTCTGTGG
CAGGCGTTGATGGCTATTAAACCCAAGCCTTGTATATACTAGGCAAGTACCCATCCACTGAACTACAGCCCTAGCATGGACCTCACAGGGCAATGGC
CTGACATCTGGGAAACACTATCACAGAGTATAATAATAAAACCGTAGCATGCTTTTCAGATTGAGCATTTCTGCTGGGTCACACTTGGAAAACCTTC
TTATTGTTATCATGAGTATGTGTGCATACATGTGGAGGTGAGAGGATGACGTCATAGAGACAGCTCTGTCTCCCATTCTTTATTGCCAATATTATTT
TATGTTTTGTCTGCGTGTATGTTTGTATACCAAAGTGCATGCAGTGCCTGTAGAGACCAAAAGGGGGCATCCCTGAGACTGGAGTTAGAAGTGGCTG
TGAACCA~TCACTCTGTGGGTGCTGGGAATCAAACCCCGGTTCTCTGGCAGAGCAACTGGTGCTCTTAACCACCGAATCAACTTCTCCAGCCCTGCA
TTGCTTTAATCTTTTGGTCGATTCCCCCAATCCAACTCATACCGCCAAGTCTGAGTAGCAAGTGCCTTTATCTGGGAGACTCACTGATCTTATTTTT
TTTTCCTTTCTTTTTCTTTCTTTTTTTCTTTTTTTTTTTGAGTCAGGTATGATTATTTAGATGGCCTCGAACTCACAGAGATCCACCTCCCTCTGTT
ATGCCAGGCTTTTAAAAAACAACATTTATTTTTGAATGCATATATAGGGCTGTGCAAACACAGCCTGAAGGAGTCGTTTCTGATTGCTCACAACGTG
GTTCCAGGGATGGAACGCGGGTGACCAGCTTGAAGGTAGGTGCTTTCACCAGCCCCAAGAATTTATTTTTTAACTTTATTTTTTTAATTAAATGATT
AAATGACACATGTTCATTGTGGGTAGTGCAGGTATGCGATGGAGCACATGTAGAGGTGACATTACTGCAGGCGGTCTCTCTACCATGGGGATTCAAC
TCAGACCACTGCTTCCTTTACCAGATCATCATTCTTGCATCCCCCAATCATTTCTTTTTGTTGATGGTTTTGTTTGTTTGTTTTAGTTTTGGGGGGT
TTTTAAAGTTTTTTTCGAGACAGNNNNNNNNNNNNNNNNNNNNNNNNNNNNNNNNNNNNNNNNNNNNNNNNNNNNNNNNNNNNNNNNNNNNNNNNNN
NNNNNNNNNNNNNNNNNNNNNNNNNNNNNNNNNNNNNNNNNNNNNNNNNNNNNNNNNNNNNNNNNNNNNNNNNNNNNNNNNNNNNNNNNNNNNNNNN
NNNNNNNNNNNNNNNNNNNNNNNNNNNNNNNNNNNNNNNNNNNNNNNNNNNNNNNNNNNNNNNNNNNNNNNNNNNNNNNNNNNNNNNNNNNNNNNNN
NNNNNNNNNNNNNNNNNNNNNNNNNNNNNNNNNNNNNNNNNNNNNNNNNNNNNNNNNNNNNNNNNNNNNNNNNNNNNNNNNNNNNNNNNNNNNNNNN
NNNNNNNNNNNNNNNNNNNNNNNNNNNNNNNNNNNNNNNNNNNNNNNNNNNNNNNNNNNNNNNNNATTAAAGGCGTGTACTACCACTGCCTGGGCAT
AACCGGCCTTTCTGCCTTATTTGTTTCGAAACGGAGTCTCATGTAGCCTGAGGTGGCCTCAAACATGCAATGTAGCTGCAGCTGGGATTACATATGT
TCACCACCACAACCTGTTTTATGCACTGCTAAGAGATTAAACCTGGGCCTTCGTGCTAGGTAAGGACTCTATTAACAGAGCTACAACCTCTGCCTGG
TTTTTAGTTTTTCAGACAGGGCTTTGCGACATAGCCCTAACTGGCCTTGAACATGCAATGATCCTCCTGCCTCGGCCTCCTGGGTCCTCAGATTGTT
GATGCTACACCCACATATCTCAGACCTGAGGGTTGGCAGCTTGGGCCATGCTCTGATTTGGGAGTGACATATTAACAGTAGTTTAATACGAATTTGA
ATCCACCTTACTTTTTTGGTGGCACTGACATTGAACTCATGGCCTTCCACAGGCTTTTACGTGAGAAATGTTTTACCTCCCTTCCTTGAGCCATGAG
CGAGCCCCTCACTGGTGGAGTCTATGCAGCTGGTCTGAAACTCATACCATCTTCCTGCCCCACTCTCCGAGTGCTGAGTGTCTACAGAGCTCCTGAC
TCTGCCTCGGACGTGATGTCTGTGGGACCTTGGCTATAGAAGGGAGGCAGTCACACCACCCATTTTTGGCTTCCATGTCGGCAATGGAGAGCTTGCC
ATACTCACCTGATGTTGTCTGTACAGAAGGGGGACGGTAAACAAAGCAACCACTCCTACAGATGCAGAGAGAGAGATGGGGGATGGGGGGTGTCAGG
TTCTCCTGGCAAAGGGTCAGCTCCGTTGAGGGCTTTTCCACTCGCGACCAAATTCCCAAAATAACGACTCTGAGACTCAATATTTCATGAACAAATG
CTTGGGCTAGCTTGGGCTTGTTCCCTGACAAGCCCCTATCTCATTTAACCCGTTTATTCTATTCTATGAATGCCACATGGCTGGTTACCTCGTCTCA
GTTTCATGAGACCCTGTCATCAGCACTAGGGCAAACCCTGATTCTATTACTCTCTTCCTGCAGGAGCTCGGGCCCCCTATTTCCTCCCTAAGCTAAT
AGCCCAACAGCTTTTGATTGACAGGTGATGCTTCCACACAGTGCACACGAAGATTCTCTTTACCCTCCATGTGNNNNNNNNNNNNNNNNNNNNNNNN
NNNNNNNNNNNNNNNNNNNNNNNNNNNNNNNNNNNNNNNNNNNNNNNNNNNNNNNNNNNNNNNNNNNNNNNNNNNNNNNNNNNNNNNNNNNNNNNNN
NNNNNNNNNNNNNNNNNNNNNNNNNNNNNNNNNNNNNNNNNNNNNNNNNNNNNNNNNNNNNNNNNNNNNNNNNNNNNNNNNNNNNNNNNNNNNNNNN
NNNNNNNNNNNNNNNNNNNNNNNNNNNNNNNNNNNNNNNNNNNNNNNNNNNNNNNNNNNNNNNNNNNNNNNNNNNNNNNNNNNTTTTTGTAGAGAGG
GCTGAGGTCAAGTTTAAGATTAGGAAAGAGAATCAAGAATTATCAAGGATAAAGGGAGAGGTCAGGATTTACAGGGGAGCAGGGTTCATGGTCAGAA
TGAAAATGGATGAGAGAGGGCAATGCGTGAGCTGAGGTCAAGGGTCACAATGGACGGTCCGTCGGCGGGGGCTGGGCAGGGCCAAGGATTCTCACTG
GAAAGGGTTGGTGCCGTCGCCCCGGTGCACGGCCTGCAGCACTTTGCGGTAAACCCTGAGAGAGATGGTGGCGCAGAGACCCAACAGGGCCAGGTGC
GCAGCCACGGACACGATGGTAAAGTGCAGGAGGCAGAGGAGAGAGGCCATGAGGCCCGTGAAGACCGCTCCCGACGTCCTGGTGTCCTTCCAGTACA
ACAGGTCTGCCACTGTGGAAAAGAAGACAATGTTGGGACCCGACCTGACCAAGCTCACTCCCTTTCTGTTTGTTTTTTAGAGATAAGGTCTCACTAT
GAAGCTAAGGCTGACTTCAAACTATGAAACCCTGGCTGGTCTTGAACTCCTGATTATTCTAATTCATCCTTTCTTTTTCTTAGACTGAGTTAAGTTT
GACCGGCTTCAAACTCAAGACAAATACTCGTGCCTCTACCCTTTAGTGCTTCAAGGAGGTGCTAAGGATCAAATTTAGGGCTTCATGCATGCTAGGT
AAAACCCAACTGAGCTACTTCCCTGAC
MOUSE SEQUENCE - mRNA
ATAAATTCTTATTTTGACACTCACCAAAATAGTCACCTGGAAAACCCGCTTTTTGTGACAAAGTACAGAAGGCTTGGTCACATTTAAATCAGTGAGA
ACTAGAGAGAAATACTATCGCAAACTGTAATAGACATTACATCCATAAAAGTTTCCCCAGTCCTTATTGTAATATTGCACAGTGCAATTGCTACATG
GCAAACTAGTGTAGCATAGAAGTCAAAGCAAAAACAAACCAAAGAAAGGAGCCACAAGAGTAAAACTGTTCAACAGTTAATAGTTCAAACTAAGCCA
TAGAGATATTAAAATGAAAAGGTTTGCTAATAGAGTAACATTAAATACCCTGAAGGAAAAAAAACCTAAATATCAAAATAACTGATTAAAATTCACT
TGCAAATTAGCACACGAATATGCAACTTGGAAATCATGCAGTGTTTTATTTAAGAAAACATAAAACAAAACTATTAAAATAGTTTTAGAGGGGGTAA
AATCCAGGTCCTCTGCCAGGATGCTAAAATTAGACTTCAGGGGAATTTTGAAGTCTTCAATTTTGAAACCTATTAAAAAGCCCATGATTACAGTTAA
TTAAGAGCAGTGCACGCAACAGTGACACGCCTTTAGAGAGCATTACTGTGTATGAACATGTTGGCTGCTACCAGCCACAGTCAATTTAACAAGGCTG
CTCAGTCATGAACTTAATACAGAGAGAGCACGCCTAGGCAGCAAGCACAGCTTGCTGGGCCACTTTCCTCCCTGTCGTGACACAATCAATCCGTGTA
CTTGGTGTATCTGAAGCGCACGCTGCACCGCGGCAGTGCCCGGCGGGTTTCTGGGCGGGGAGCGATCCCCGCGTCGCCCCCCGTGAAACCGACAGAG
CCTGGACTTTCAGGAGGTACAGCGGCGGTCTGAAGGGGATCTGGGATCTTGCAGAGGGAACTTGCATCGAAACTTGGGCAGTTCTCCGAACCGGAGA
CTAAGCTTCCCCGAGCAGCGCACTTTGGAGACGTGTCCGGTCTACTCCGGACTCGCATCTCATTCCACTCGGCCATAGCCTTGGCTTCCCGGCGACC
TCAGCGTGGTCACAGGGGCCCCCCTGTGCCCAGGGAAATGTTTCAAGCTTTTCCCGGAGAGTACGACTCCGGCTCCCGGTGTAGCTCATCACCCTCC
GCCGAGTCTCAGTACCTGTCTTCGGTGGACTCCTTCGGCAGTCCACCCACCGCCGCCGCCTCCCAGGAGTGCGCCGGTCTCGGGGAAATGCCCGGCT
CGTTCGTGCCAACGGTCACCGCAATCACAACCAGCCAGGATCTTCAGTGGCTCGTGCAACCCACCCTCATCTCTTCCATGGCCCAGTCCCAGGGGCA
GCCACTGGCCTCCCAGCCTCCAGCTGTTGACCCTTATGACATGCCAGGAACCAGCTACTCAACCCCAGGCCTGAGTGCCTACAGCACTGGCGGGGCA
AGCGGAAGTGGTGGGCCTTCAACCAGCACAACCACCAGTGGACCTGTGTCTGCCCGTCCAGCCAGAGCCAGGCCTAGAAGACCCCGAGAAGAGACAC
TTACCCCAGAAGAAGAAGAAAAGCGAAGGGTTCGCAGAGAGCGGAACAAGCTGGCTGCAGCTAAGTGCAGGAACCGTCGGAGGGAGCTGACAGATCG
ACTTCAGGCGGAAACTGATCAGCTTGAAGAGGAAAAGGCAGAGCTGGAGTCGGAGATCGCCGAGCTGCAAAAAGAGAAGGAACGCCTGGAGTTTGTC
CTGGTGGCCCACAAACCGGGCTGCAAGATCCCCTACGAAGAGGGGCCGGGGCCAGGCCCGCTGGCCGAGGTGAGAGATTTGCCAGGGTCAACATCCG
CTAAGGAAGACGGCTTCGGCTGGCTGCTGCCGCCCCCTCCACCACCCCCCCTGCCCTTCCAGAGCAGCCGAGACGCACCCCCCAACCTGACGGCTTC
TCTCTTTACACACAGTGAAGTTCAAGTCCTCGGCGACCCCTTCCCCGTTGTTAGCCCTTCGTACACTTCCTCGTTTGTCCTCACCTGCCCGGAGGTC
TCCGCGTTCGCCGGCGCCCAACGCACCAGCGGCAGCGAGCAGCCGTCCGACCCGCTGAACTCGCCCTCCCTTCTTGCTCTGTAAACTCTTTAGACAA
ACAAAACAAACAAACCCGCAAGGAACAAGGAGGAGGAAGATGAGGAGGAGAGGGGAGGAAGCAGTCCGGGGGTGTGTGTGTGGACCCTTTGAGTCTT
CTGTCTGACCACCTGCCGCCTCTGCCATCGGACATGACGGAAGGACCTCCTTTGTGTTTTGTGCTCCGTCTCTGGTTTTCTGTGCCCCGGCGAGACC
GGAGAGCTGGTGACTTTGGGGACAGGGGGTGGGGCGGGGATGGACACCCCTCCTGCATATCTTTGTCCTGTTACTTCAACCCAACTTCTGGGGATAG
ATGGCTGGCTGGGTGGGTAGGGTGGGGTGCAACGCCCACCTTTGGCGTCTTGCGTGAGGCTGGAGGGGAAAGGGTGCTGAGTGTGGGGTGCAGGGTG
GGTTGAGGTCGAGCTGGCATGCACCTCCAGAGAGACCCAACGAGGAAATGACAGCACCGTCCTGTCCTTCTTTTCCCCCACCCACCCATCCACCCTC
AAGGGTGCAGGGTGACCAAGATAGCTCTGTTTTGCTCCGTCGGGCCTTAGCTGATTAACTTAACATTTCCAAGAGGTTACAACCTCCTCCTGGACGA
ATTGAGCCCCCGACTGAGGGAAGTCGATGCCCCCTTTGGGAGTCTGCTAACCCCACTTCCCGCTGATTCCAAAATGTGAACCCCTATCTGACTGCTC
AGTCTTTCCCTCCTGGGAAAACTGGCTCAGGTTGGATTTTTTTCCTCGTCTGCTACAGAGCCCCCTCCCAACTCAGGCCCGCTCCCACCCCTGTGCA
GTATTATGCTATGTCCCTCTCACCCTCACCCCCACCCCAGGCGCCCTTGGCCGTCCTCGTTGGGCCTTACTGGTTTTGGGCAGCAGGGGGCGCTGCG
ACGCCCATCTTGCTGGAGCGCTTTATACTGTGAATGAGTGGTCGGATTGCTGGGTGCGCCGGATGGGATTGACCCCCAGCCCTCCAAAACTTTCCCT
GGGCCTCCCCTTCTTCCACTTGCTTCCTCCCTCCCCTTGACAGGGAGTTAGACTCGAAAGGATGACCACGACGCATCCCGGTGGCCTTCTTGCTCAG
GCCCCAGACTTTTTCTCTTTAAGTCCTTCGCCTTCCCCAGCCTAGGACGCCAACTTCTCCCCACCCTGGGAGCCCCGCATCCTCTCACAGAGGTCGA
GGCAATTTTCAGAGAAGTTTTCAGGGCTGAGGCTTTGGCTCCCCTATCCTCGATATTTGAATCCCCAAATATTTTTGGACTAGCATACTTAAGAGGG
GGCTGAGTTCCCACTATCCCAGTCCATCCAATTCCTTCAGTCCCAAAGACGAGTTCTGTCCCTTCCCTCCAGCTTTCACCTCGTGAGAATCCCACGA
GTCAGATTTCTATTTTTTAATATTGGGGAGATGGGCCCTACCGCCCGTCCCCCGTGCTGCATGGAACATTCCATACCCTGTCCTGGGCCCTAGGTTC
CAAACCTAATCCCAAACCCCACCCCCAGCTATTTATCCCTTTCCTGGTTCCCAAAAAGCACTTATATCTATTATGTATAAATAAATATATTATATAT
GAGTGTGCGTGTGTGTGCGTGTGCGTGCGTGCGTGCGTGCGTGCGAGCTTCCTTGTTTTCAAGTGTGCTGTGGAGTTCAAAATCGCTTCTGGGGATT
TGAGTCAGACTTTCTGGCTGTCCCTTTTTGTCACCTTTTTGTTGTTGTCTCGGCTCCTCTGGCTGTTGGAGACAGTCCCGGCCTCTCCCTTTATCCT
TTCTCAAGTCTGTCTCGCTCAGACCACTTCCAACATGTCTCCACTCTCAATGACTCTGATCTCCGGTNTGTCTGTTAATTCTGGATTTGTCGGGGAC
ATGCAATTTTACTTCTGTAAGTAAGTGTGACTGGGTGGTAGATTTTTTACAATCTATATCGTTGAGAATTC
MOUSE SEQUENCE - CODING
ATGTTTCAAGCTTTTCCCGGAGACTACGACTCCGGCTCCCGGTGTAGCTCATCACCCTCCGCCGAGTCTCAGTACCTGTCTTCGGTGGACTCCTTCG
GCAGTCCACCCACCGCCGCCGCCTCCCAGGAGTGCGCCGGTCTCGGGGAAATGCCCGGCTCCTTCGTGCCAACGGTCACCGCAATCACAACCAGCCA
GGATCTTCAGTGGCTCGTGCAACCCACCCTCATCTCTTCCATGGCCCAGTCCCAGGGGCAGCCACTGGCCTCCCAGCCTCCAGCTGTTGACCCTTAT
GACATGCCAGGAACCAGCTACTCAACCCCAGGCCTGAGTGCCTACAGCACTGGCGGGGCAAGCGGAAGTGGTGGGCCTTCAACCAGCACAACCACCA
GTGGACCTGTGTCTGCCCGTCCAGCCAGAGCCAGGCCTAGAAGACCCCGAGAAGAGACACTTACCCCAGAAGAAGAAGAAAAGCGAAGGGTTCGCAG
AGAGCGGAACAAGCTGGCTGCAGCTAAGTGCAGGAACCGTCGGAGGGAGCTGACAGATCGACTTCAGGCGGAAACTGATCAGCTTGAAGAGGAAAAG
GCAGAGCTGGAGTCGGAGATCGCCGAGCTGCAAAAAGAGAAGGAACGCCTGGAGTTTGTCCTGGTGGCCCACAAACCGGGCTGCAAGATCCCCTACG
AAGAGGGGCCGGGGCCAGGCCCGCTGGCCGAGGTGAGAGATTTGCCAGGGTCAACATCCGCTAAGGAAGACGGCTTCGGCTGGCTGCTGCCGCCCCC
TCCACCACCCCCCCTGCCCTTCCAGAGCAGCCGAGACGCACCCCCCAACCTGACGGCTTCTCTCTTTACACACAGTGAAGTTCAAGTCCTCGGCGAC
CCCTTCCCCGTTGTTAGCCCTTCGTACACTTCCTCGTTTGTCCTCACCTGCCCGGAGGTCTCCGCGTTCGCCGGCGCCCAACGCACCAGCGGCAGCG
AGCAGCCGTCCGACCCGCTGAACTCGCCCTCCCTTCTTGCTCTGTAA
HUMAN SEQUENCE - GENOMIC
CACTAAGCACTCTCACCACCCAATGCCTGGAGTGGTTGTAGTCAGTGAGTGACACATTGCACAGTGTGTGCCCCGTGGATTGGGGGTGGGTGAGAGA
CAGCCCCCACAGTGAGTGGCACCCCTGGCCAGGGCCTGGGACAAGTCTGTATCCAAGGGTGGCTCTCTGCTTAGGTCTGTGTTTGTACCTGGGTGTG
TCTGTGTCTGCCCTACTCTGTGCATACTCATATATGTGAACCCGTGTGTGTGTGTGTAGTTGTGAGTGTGTGTGGAAGAGGCTGCATGGCAGTGGAA
GCTAGGTGTGTGATTCGTGTATCTGTGTGCCTAGAGTGCCTTGTTCTATAGATTTGGATGCCACTCCAAGCAAGTCAGTGGGTCTTTTTGTTTTTTG
TTTTTTGAGATGGAATCTCACTCTGTTGCCCAGGCTGGAGTGCAGTGGCACGATCTTGGCTCACTGCAACCTCTACCTCCTGGGTTCAAGTGATTCT
CCTGCCTCGGCCCCCCGAGTAGCTGGGATTACAGGTGCCCACCAATACACTCAGCTAATTTGTTGTATTTTTAGTAAAGATGGGGTTTCACCATGTT
GGCCAGGCTGGTCTCAAACTCCTGACCTCATGATTCTCCTGCCTCGGCCTCCCAAAGTGCTGGGATTACAGGCATGAGCCACCGCGCCCGGCCAAGT
CAGTGGGTCTTTAGGAGCTGTTTCGTACGGTGTGACTGTGAGTGAACCTTCGCACACGTGTCTGTACGGATATCTAAGAAATTCTTCAAGTAGGCCG
GGCACAGTGGTTCAGGCCTGTAGCCTTAGCACTTTGGGAGGCCCAGGTGAGTGGATCGCTTGAGCTCAGGAGTTCGAGAACAGCCTGGGCAACATAG
TGAGACTTCGTATCTATAAAAAATATGAAAATTAGCCAGGCATGACAGTGGGCACCTGTAGTCCCAGCTACTACTTGGGGGGCTGAGGCAGGAGGAT
CCCTTGAGCCTGGGAGGTGGAGGCTGCAGTGAGCTGAGATCGAGCCACTGCACTCCAGCCTGGGCGACAGAGGGAGACCCTGTCTCAAAAAAAAAGA
AAAGAAAAGAAAAAAAGAAGACATTCTTCAAGTCCACAACTCTGAGGGTATCACTGTGAGAGCAGGGGTCCTAGCTCTACCCATTTGTGTGTGTGTG
GAGATGTGTAAGTCTATGTAGACAAAAGTGTGTGTCATTTACTGTGTTTGGGGTGTGAACACCTATGTGATGTGTTTGCACAACTGCACGTGTTTTG
TTCTGTGTGTGTGATCGTGTGTTCAAATAAGTCATCTTGTCGCCGGGCGTGGTCGCTCATGCCTATAATCCCAGCACTTTGGGAGGCCTAGGCAGGA
GGACCATTGAGCCCAGGAGGTCCAGACTGCAGTGAGCCGAGATTGCGCCACTGCACTCCAGCCTGGGCGACAGCAAGACCTTGTCTCAAAACAAAAG
CAAAAACAAAAATAAACAAATAGTCATCAGGTGCCTGCACAGACAAAGGTGAAAGGTGTCTGCCTGTTGAGATCTGTGGATAGGGTGTATATATGGA
CATCTCAGCCTGTCTACGTGTGTATCTGTCTCTGTCCTCACGGCAAAAGAGAGGTTGGCCGGGTGTGTGGTGGCTCACGCCTGTAATCCCAGCACTT
TGGGAGGCTGAGGCGGGCGGATCACCTGAGGTGAGGAGTTCAAAACCAGCCTGGCCAACATGGCGAAACTCCATCTCTTCTAAAAATACAAAAAAAT
TAACCGGGCGTGGTGGCACACGCTTGTAATCCCAGCTACTCAGGGAGGCTGAGGCATTAGAATTGCTTGAACCCAGGAGGTGGAGGTTGCAGTGAGC
CAAGATTGCGCCACTGGACTCCAGCCTGGGCAACAGAACAAGACTCCGTCTCAAAAAAAAAAAAAAAAAAAAAAAGAGGCTCAGATATGTTTCTGTC
TGAGAGTCTGTCAGAGTTTAGGAATTAGTAAATGAATGAATGGTGAAGATCCATTTACTCAACAAACATTTATTTATTTATTTATTTATTGAGACAG
AGTCTCGCTCTGTCACCCAGGATGGAGTGCAGTGGCGCAATCTCGGCTCACTGAAGCCTCTGCCTCCTGGGTTTAAGAGAGTCTTGTGCCTCAGCCA
CCAAGTAGCTGGGATTACAGGTGTGTGCCACTGCGCCCAGCTAATTTTTGTATATTTAGTAGAGATGGGGTTTCACCATGTTGCCCAGGCTGGTCTC
GAACTCCTGGCCTGAAGTGATCTGCTCACCTCAGTCTCCCAATATGCTGGGATTACAGGCATGAGCCACCAGTCCTGCCTCATTTATTCTTATATTA
CAGCCTCCCAAAGTGCTGGGATTACAGGCATGAGCCACTGTGCCTGGCTTGAACAAATATTTAATAACCACCTATTGGGTACCACGTGCTATGCTGG
GGACAAGGCAGTGACCGGGATGGTTTTGGCCGAGCTTTCACCCAGCTCACAACCCAATGAGGGAGACAAACCTATCCCCAGACAATGATGAGCCCAG
ACTTGGAGGAAAAGACTATGAGCCACAGGAAGCGAAGGGAAGAGTGACCCAGGCAGAGGGAAAAGCACCTGCAAAGGCCTGAAGTCCAGGGAGAGAG
GCCAGGCATCTGGAACACAACGGGGAGAGGAGAGACGAGACTAGGGCACCCTCGGAGCAGGTCGTTCAGGGCCTCAGGAGCCATGGGGAGGAGTATA
ATGCAGGATGCAGGGGTACTGGGAGGGTCAAGCTAACAGTGTCCAATCTGGGTTACTCTGCTTCCCTGAAACTCCAGGGACATCTCCTCCAGGAAGC
CCTAGGGATTGCTCAGTGTGGAGCGGCTCAGCCACCCAGTCACACTCACTATTCAATGCTGAGCACTGAGGAGGCAGCCGTTACTAAATCAGCCTGG
ATTTGCCCTCCCAGAGGTCACAGTCACAACAGTCAAACACACACCTGCACGTGCACACTCATGAACGTGCCCCTCCCCTCCTCTGGAGCCTCAGAAA
CCCACAGACCTTGTTCCTCCCAGGGGGTGTCCCTGGGGCCAAAGCTTCTGCACTACCAGGGGGCTTGTTGGAAATGCAAAAGATGGCTGGGCACAGT
GGCTCACACCTGTAATCCCAGCAGTTTGGGAAGCTGAGGCAGGCAGATCATTTGAGGTCAGGAGTTCATTTGAGGTTGGGAGTTCAAGACCAGCTTG
GCCAACATAGCGAAACTCTGTCTCTACTAAAAATACAAAAAAATTAGCCGGGCGTGGTAGCACACGCCTGTAATCCCAGCTACTTGGGAGGCTGAGG
CAGGAGAATCTTTTGAACCCGAGAGGTGAAGGCTGCAGTGAGCCAAGATGGCACCACTGCACTCCAGCCTGGGTGACAGAGTGAGTCTTAAAAAAAT
AATAATAAAATAGGCTGGGCGCGGTGGCTCACGCCTGTAATCCCAGCACTTTGGGAGGCTGAGGCAGGCGGATCACCTGAGGTCAGGAGTTCGAGAC
CAGCCTGACCAAAATAGTGAAACCCCGTCTCTACTAAAAATACAAAAAAATTTAGCTGGGCGTAGTGGCTAACGCCTGTAATCCCAGCTACAGGCTG
AGGCAGGAAAATTGCTTGAACCCAGGGGTGCAGAGGTTGCAGTGAGCCAAGATGGCACCATTGCACTCCAGCCTGGGCAACAACAGTGAAAGTCCGT
CTCAAAAAACAAAATACAAAAATTAGCCAGGCATGGTGGCACACACCTGTAATCCCAGCTACTCGGGAGGCTGAGGCAGGAGAATCACTTGAACCCG
GGAGGCAGAGGTTGCAGTGAGCTGAGATCGTGCCACTGCACTCAAGCCTGTGTAACAAGAGTGAAATTCCGTCTCAAAATAAAATAAAATAATAAAA
ATAAAAAGATGACCACAGCAGATCTGCTGGCTCTCCAGGCAATTCGTGATCACCACGAATTGAGAAGCGCTGCTCTCAGGCTTAACCCCCCTGTACC
TCAGTTTCCTTTTCTGTACAAGGAGATCAAAACAGAATCCATGTAGAGGACTGACGTGGAGTGAGGGTTAACTGAGATAATGAGTGTGAAAGTGCTA
AGCACAGCTTCCTAAGTGCTTGTTTTCAGCAGCTCCTCTTCCTCTTTTCTATTTTTTTATTTTTATTTTTTTTGGGGGGGGAACAGGGTCTCGCTCT
GTTGCCCAGGCTGGAGTATAGTGGCAGAGTCATAGCTCACTGCAACCTCAATCTCTCAGGGCTCAAGTGATGCCCGTGCCTCAGCCTCCTGAGTGGC
TGGGACTACAGGTGTGTGCCACCATGCCCAGCTAATTTTTAAATTTCTTGTAGAGGTTGGGGGTGGGTCTCACTATGTTGCCCAGGCTGGTCTTGTA
CTCCTGGCCTCTGGCGATCCTCTTACCTAGGCCTCCCAAAGTGCTGGGATTACAGGCGTGAGCCACCACACCCAGCCCTCCTCCTCCTCTGTATTAT
TAAATTTCAGAGCTGGAAAGAAATTTCGAAGACCGCCATCACTCAACCTTCTTGCTCTACAGATGGGGGAACTGAGGAACAGAGGAGCAGAGGTTTG
GCCAGAGGAAGGTGGGAAGGACGTGGTGTGGCTGGCCTTCACAGACTCTGCCGGGGGCTGTTTACAGGATACTCTGAGGAAAGCCAGGATGGGCACT
GATACCCACCTCCACCCTGCGGGAGGCAGAAGGCTAAGGCTCCCCCAGCCGTCTCCCCCAAGCAGAGCTGAGCCCTTGGGAGCCAGGGCAGAGATGC
AACCCTCTCCCCCATGCTCAGGTCCTCCTCCTCCTGGAAGCTCTCCTTCCAAGAGGAGCCTCTTATTTTATTTTTTATTATTATTATTTTTGAGACA
AGGTCTCACTTTGTCACCCAGGCTGGAAGTGCCGTGGCATGATCATGGCTCACTGAAGCCTTGCCCTCCCCAAGCTCAAGTGATCCTCTCACCTCAG
CCTCCCAAATAGCTGAGACTACAGGCACACGCCACCACCCCTGGCTAGTTTTTGTATTTTTAGTAGAGATGGGGTCTTGCCATTGTCCAGGCTGGTC
TTGAACTCCCGGGCTCAAGTGATGTGCCCACCTTGGCCTCCCAAAGTGCTGGGATTACAGGCATGAGACACTGAGCCTGGCAAGGAATGAGCCTTAT
GGAGAAGAACTTGATTTACCCACTCCATGCTCTGCAGGCAGGTGTGTCATGTCTGTGAGTGCAGGTGTGTGTGTGTGTGTGTATGTGTGTGTGTGTG
TGTCTCCAGGGCCAATTTCTCCCTTAGGCCCAGGGGCACAGTGCCTAGGGCCCATGATAAATTTAACCGACCCACGGATATGGGTCAGGAGGGTATA
CATGTATAAAGTTCAGGAAGACTTTGTTTTAGTAACAAAACGAGCATGTACAATCTGTCAGGAGCCTTATGATATCTTCCCACCAGTCTCATGAGTG
GGCACTACATCTTGTTCTCCTTTGTCGGGTAGGGAAACTGAGGCCCCGGATGTCCTAGCTCAAGTTCACCAAGCTACTTGGTGATAGAAGCGGAACA
TAAGCCTAGGCCACCTAGCTTCTGGGTCTGCGATCGTGTGAGGATAAATGCCCAGTGTGTTCGTGAACATGAGCATCCCTGTGTGAATAAATTGACA
TACATAAACCCATTTAATAAATTTCAAAGCCAGGCGCCGTGGCTTACTCCTGCAATCTCAGCGCTCTGGGAGGCTGAGGTGGGAGGATCGCTTGAAG
CCAGGAGTTTGAGATCAGCCTGCAACAAAGTGAGACCCTGACTCTAAAAACATTTTTTTGAATAAAAAAATTAGGCTGGACACAGTGGCTCACGCCT
GTAATCCCAGCACTTTGGGAGGCCAAGGTGGGTGGATCACTTGAGGTCAGGAGTTTGAGACCAGCCTGGTCAACAGGGTGAAACCCTTTCTCTACTA
AAAATAGAAAAATTAGCCAGGCGTGGTGGCACATGCCTGTAATCCCACCTACTGGGGAGGCTGAGGCCGGAAAATTGCTTGAATCTGGGAGGTAGAG
GTTGCAGTGAGCCAAGATCATGCCATTGCACTCCAGCCTGGGCGAAGAAACGAGACTCTGTCTCAAAAAAAAAAAAAAAAAATTAGTCAAGCATGGT
GGTACGCACCTGTAGTTGTTAGTTACTTGGGAGGCTGAAGCAGGAGGATTACTTGAGGCCAGGAGTTCGAGGTTACAGTGAACTATGATTGCATCAC
TGCACTCTAGCCTGGATGACAGAGCAAGATCCTATCTCAAAATAATACTAATAGTTCAAGGAACAGACTTTGAAGCCTGACACCCTGCATGGTGTTA
TTCCAGCTTTGCTACTTACTTGCTGTGTGACTCTGGGTGAATAACTTAACCTCTCTGGGCTTCTGTTTCCCTTCCTGTAAAATGATCATTTGTACCT
CACAGGAGTGTTGTGAGAATTAAATAAGTTAATATAAGCTCTTGGGAAGAATTAGCTCTTGTTATGGTTGTGTGAAGAGCTTTACACGAGTCCCTCT
GCAGGATGCATGGTTGTTGGTCTGTGTGTGTGTATATATATATATGTGTGTGTGTATGTGTGTATCTATGTGTATATGTGTATATGTGTGTGTTGCT
CTCTTGATCTCTGAGTGTTGTGTGTGTGTCAATGTGTGAGATCATATATGCACCTTTAGTAAAGATCTAGGGGTCTCTGTGTGTTTTGGGGGTCTGT
ACCTGTCCTTGGCTGTACACCTGAACCCTACGTCTTCTTGTGTGTGTAGGGATGTGTGTCATGTGTGTTGATAACCATATGACAGTGTGTGTTTCCA
CATGCCAGTGTGTGTCTGTGAAGCTGTTTCTATGTGGCTGTGGGTGATTGCCCACGCGTGACCTGGTGAGCGGCTGTGTGGAAGTCTGTGTTGCCTG
TGTCGGGTGTGGAGTCTCTGGCCAGCCAGGGTAGGTCTTTGCATGTTTCCTTTATTCCATGGAGGAGGAGATGAGGGGCTTGGATGAGACAGAAGAA
TGAGGGGTCACTCCCTGTCTGATGCTGGGGCCGAGTCACTGCCTACTAGTGGCTGCTGTGTCATCTCCCAGTCTCTGTCCCTCCCTCCTGGCTGGTG
GCAGACAGAGGGGGCGTGGAGGAACAGGGCAGGGGGTGGGCTTGAGGCTGGACTTTTGTCTGGAAACTTGAACCTCCACCTATGCCCCCCACGTCCC
TCTAGTCTTCCACATCTCCCTACACCCTCCCTACTATTGGGGCAGGGAATCAGGACTCCCTGAAAATTAAGAACCATCGCCTTGGCTCTGCCACAGG
CTTGCTGTGTAGCCCGGAGACAGGCCCTGCCCCTCTCTCAACCTGTGAAATTCAATGTTTTAAAAGTGCTTCTTCCTTTGTGCCCAGGGCTGGGCCA
GGCTGTGCACTGGGAGGGAAGTGCTGGGTTCTCTGAGGTTTGTGAAATAGCTGGTAGCACCCTTCCCAGTGGGTGCTTAAGAGTTGGGGGCTGTAGC
ATCTGAAATACCCAAGTCAGTGCAGGCATAGTGGCTCATGCCTGTAATCCCAGCACTTTGGGAGACCGAGGCAGGCGGATCACCTGAGGTTGGGAGT
TCGAAACCAGCCTGGCCAACATGGTGAAACCCCCATCTCTATTAAAAATACAAAAGTTAGGCCGGGCACAGTGGCTTACGCCTGTAATCCCAGCATT
TAAGAAGGCCAAGGCGGGAGGATCACCTGAGTTTGGGAGTTTGAGAGCAGCCTGACCAATATGGAGAAACTCTGTCTCTACTAAAAATACAAAAAAA
CTAGCCAGGCATGGTGGCACATGCCTGTAATCCCAGCTACTCGGGAGGCTGAGGCAGGAGAAGCACTTCAACCCGGGAGGCGGAGGTTGCGGTGAGC
CGAGATCGTGCCATTGCACTCCAGCCTGGGCAACAAGAGCAAAACTCTGTCTCAAAAAACAAAACAGAACAAAACAAAAATTAGCCAGGTGTGGTGG
CGCACACCTGTAATCCCAGCTACTCGGGAGGCTGAGGCAGGAGAATCACTTGAACCCAGGAGATGTAGGCTGCAGTGAGCCGAGATTGTGGCACTGC
ACTCCAGCCTGGGCAACAGAGTGAGACTCTGTCAAAAAAAAAAAAAAAAAACGTCAGATTCATGAACCCCATTTGCTAAGAAGATTTGCTCAGGTAG
TCACCTGTACCCCTGTGAGCCAAGATTGCAACAGTACATGCTAAGAGCAGTAAGAAGGAGTTTGTAAAGCTTAGAAAGACCTGACAGGCCAGGCGCT
GTGGCTCACGCCTGTAATCTCGACACTTCGGGAGGCCGAGGCAGGCGGATCACCAGGTCAGGAGTTCAAGACCATCCTGACCAATATGGTGAAACCC
CGTCTGTACTAAACATATAAAAATTAGCTTGACGTGGTGGCCCGCGCCTGTAGTCCAGCAACTCGAGAGGCTAAGGTGAGGCGGAGGTTGCAGTGAG
CCGAGATCGCCACTGCACTCCAGCCTGGCGGCAGAGCAAGACTCCGTCTCAAAAAAAAAAAAAAAAAAAAAAAAAAAAGACCTGACAAGTGAAAGCT
ACTAATATTGCCATTATCATTTAAAAAAACCCCAGACACAGGTTTTTCAGGGAGTTTCATCCAACCAGGCAGGTCTCAGAAATCAGAAAAGAAATGG
AAAGGGTAGGAAATCTGGAGTTTGACAATTCTGAGTTTGAATTTCTTGTGATGGGATCTTGGGCAAGTCATTTAACCTCCCTGAGTATCATTTTTTT
CTTTTATAAAATGAAGATTTTTCTCTCTTAACCTTCCAGAGCTGTTTTAAGGATTACAAATCTTCTACTGAAAGGCGTAGCACAGGAGCTGTGCTTG
GCAAGTGCCAAATACAAGGCATTAATTATTATTATTAGAATTAATAATAATATCCCCTCCCTCTTACACATTCTTTGTCTCCGGGTGGATTAAAAGG
TGGAAGGAGAGGCTACCAACACCATCAGAAGAGAGGCTTCTCTCTAAGTTTCATTTCCCATCTCCTCCAAATCCGCATCCCTCCCAAACGCCGGACC
TGTAAGGCCAGCAGGGTCCAAGACACACATCCTTTGCCCAGCGGGGAAGATTAAAGCTAAAGCTCAGAGAGGGAAAACATTTCCTAAGCTCGCACAG
CGAATCAGGACAGAAACCAGGACGAGCCTCGGAATCCCTCCATTACCTCCACTTTCACCTGAGCATCACAGCCCGCTCGGGACTCAGTTTCCCCACC
TACGTGACCACACCACACTAATCAGGGTCTCCTTTTGGAGATCTGCTCTTCTTCTCGAATGGGGGCGCTGCACCATCGGTAGAACAGGGTAGGTGGG
GGCGCCAGAGGTGAAGGGGACCTGCAGGCTGGGGTCTTCCCCGCCCGGGTCAGCGGGGTCCCTGCGGGGCTAGTCTAAGCGCCTATTATTACCAGCC
CCCGGGGCGGCGTTGCACTGCGCAGGCGCGGGCGGGGCGCGGGCGCGCGCGCGAGCGAGCGAGGGATTCCCTCTGACGTCATTGCTAGGATACCAAA
CAAACACTCCGCCGCGCCGGCCGAGCTCCTTATATGGCTAATTGCGTCACAGGAACTCCGGGAAGGCGGGGCCGGGATCCCCTCCCGCCGAGTGGCC
CGGAACGCAACCCCCGAGACCCCCAGGGCCCCGAGGGTCATGCAAGTGACCAGATCGAGTCTAGAACAGACCTCTTGCTGGACAGTGCGGGACTCGA
TTTGGCGGGGCCGGAGATTTGGGGAAGTTTGTCCAGCAAGGGGCGGGTGACGTAAGCAGGGGGGCGGGTCCCGGGCATATAAATACAGGCTGGCGGG
TGTGTGCTTCATTCATAAGACTCAGAGCTACGGCCACGGCAGGGACACGCGGAACCAAGACTTGGAAACTTGATTGTTGTGGTTCTTCTTGGGGGTT
ATGAAATTTCATTAATCTTTTTTTTTCCGGGGAGAAAGTTTTTGGAAAGATTCTTCCAGATATTTCTTCATTTTCTTTTGGAGGACCGACTTACTTT
TTTTGGTCTTCTTTATTACTCCCCTCCCCCCGTGGGACCCGCCGGACGCGTGGAGGAGACCGTAGCTGAAGCTGATTCTGTACAGCGGGACAGCGCT
TTCTGCCCCTGGGGGAGCAACCCCTCCCTCGCCCCTGGGTCCTACGGAGCCTGCACTTTCAAGAGGTACAGCGGCATCCTGTGGGGGCCTGGGCACC
GCAGGAAGACTGCACAGAAACTTTGCCATTGTTGGAACGGGACGTTGCTCCTTCCCCGAGCTTCCCCGGACAGCGTACTTTGAGGACTCGCTCAGCT
CACCGGGGACTCCCACGGCTCACCCCGGACTTGCACCTTACTTCCCCAACCCGGCCATAGCCTTGGCTTCCCGGCGACCTCAGCGTGGTCACAGGGG
CCCCCCTGTGCCCAGGGAAATGTTTCAGGCTTTCCCCGGAGACTACGACTCCGGCTCCCGGTGCAGCTCCTCACCCTCTGCCGAGTCTCAATATCTG
TCTTCGGTGGACTCCTTCGGCAGTCCACCCACCGCCGCCGCCTCCCAGGTAAGTTTTTGATAGTAGGGGTGCTGCTTTGTAGGTTTTATTTTTTAAG
TCAAGGGTGAAAAGAATAAACCCCAACCCCCACAAAAAGGCGCATCAGAACCCTAGATCTGAGATGGAAAAGGCTCACAGCGCACTTTGCAAACTGC
AAAGAGTCGGGAGATGTTTGCAATTGGTTGCGTGCGTGGAGCGCAAGGAGGGAACGCGGCAGGGAGGGTAGGCTTTGGGGCGAGGTGGGGGTGGGGT
GGGTAATGCGCTGCTCAATGCAACGTGTATGCGGTAGCGGGGCTGAGAACTTTGAGCCGGCCCCGGGACTGCCCCCTGCTCGGGTCCCAGACCTGAA
GCTAGCGCAGTTAGGCAGGTGGGGGAAATCCCGGGGAAGCTTCCAGCAGTCTCTTTTCCTTTCGTCCTCGTTCGGAGCGCCCACTTCGGTGCCGGGT
CGCCCTCCACCCATCGGGAAGAGGGGCCTCGAACCCTCAGCCGCGCTGCCTCCGCCTCCTGCGCGGAGACGTAACGGGGGACCCGTGCGTAACGGCT
GACGCGCTGGAATCCTCCGTCTGACGCGGGGCACGCACGGCGCGCGGCGCCCCCTTCGTCCGCCCCGCCCCTGACGTCCCGGGAGCGTTCTATTTTG
GAACGCCGGGGCCACGTTGCTAAGGGAGGGGGCAGCCCGGCGTTTCGATTGGCCGCCGGGGCGCACGCCTTGGCCAATCAGGTTTCCCTTCCTATTT
GTAGGGTGCATTTTCCTTCCCCCCTCTCTGTCCCCGGAACCCGTGGTTCCTTGGCGGCTGGGTCTCTTTTCGGCGCCTCTAGAGGCAGAGGGAGGGG
ATCCCTGTCGTGACAAGAGCGCCTGTCTGCGACCCAATGGATCTGCGAGGCCCTTGCGGGGATCTAGTCCCTGGGCTCTCAGGAGAAGGGGGTGTCT
GCTTGTGTGCTGGCGTTTCTTGGAGAGATACGGTGGCTGTCACCCTCTTCTCCAGGCACACACAGACACATTCCCACTCCGTCTGCTCCTCATGCCC
GGTTCCTCCGGTGTGTCCCAAGACAGGACTAGAACCGCGAACCGAAGGGCAACCAGCCAGGTGGTCTCCAGGAGCTCCGCCCCCTCTGGGTTCCCAG
GACTCTGATTGGTCGGCGAGCCAGCCCTTCCCTCACCACGCCCCCCGAGAGAGTAGTTAAGCCTTCAGAGCAGTTCCAGGAGTCCATTTACGGGAGG
GGGGAGATGAGCGCTGCTGAGGCTTGGGGGCTCAGGTCCCGCACCATTCCCCCTCCGCGACAATCTGAGAGAGCTCCAGTGGTTACTTTTATCTACC
TGTCCGTTCACCCTAAACTGTCACTCGTCAGTCTCACTCTGAGAAGAGACAGTAACTTGAAACGTTGTTCTAAACTCCTAGGCCCGTCCCCCAAACA
CCCTTTTGACTGGGACCCCCGCCCCTGCATGGGACCTCGCGCAGAGGGGGGTGTGTATGTGTGTGAGTGTAGAGGAAGGCTTGGCCTAAGGCCTCTC
CTTCTCCCTCCCCTTGCCTCTGGGGTGGGGGTGGGGTGTTGTGGCTGTGTGTGTGGCTGTGGCTCCGTCCCGGGGGTTCTGTCACCCGGCTGTGTCC
AGCCTCCTCTCCACCCCCCATACCTAAGAGTCACCAACCCGGGGTGTGATTCACCACCCGCTGGAACCGTGCAACCTTTCCCCGAGGAAGAAGGAGG
AGGTAGAAGCCAGTTGAGCAGAAATCCTCTCATTAACCACTGCGTCACGGTGTAGTGGAAGGGTGGGTGTTGTGGCTTTTTCCCTGTGACACACACA
TCCACACTCGCTCACCCTGTGCTCACTCACGGGGTCGGTGTGTGTTATGTGTGTTGGGTGTGTGTGTGTCGGTGTCTTTGTTTGTGTGTCTACGCCT
GTGTGTGTATGTGTCACCCCGTAGGAGTGCGCCGGTCTCGGGGAAATGCCCGGTTCCTTCGTGCCCACGGTCACCGCGATCACAACCAGCCAGGACC
TCCAGTGGCTTGTGCAACCCACCCTCATCTCTTCCATGGCCCAGTCCCAGGGGCAGCCACTGGCCTCCCAGCCCCCGGTCGTCGACCCCTACGACAT
GCCGGGAACCAGCTACTCCACACCAGGCATGAGTGGCTACAGCAGTGGCGGAGCGAGTGGCAGTGGTGGGCCTTCCACCAGCGGAACTACCAGTGGG
CCTGGGCCTGCCCGCCCAGCCCGAGCCCGGCCTAGGAGACCCCGAGAGGAGACGGTGAGTAAGGGACATCAGAACTTGGCCTGGGTAGGGGGAAGCA
AGAGAGGCAGGAAGTTTCTTATGAATGGAGGGGGGCTCCACTAAGGCCTCAGTGTTACAGAAACCCCAAGATCCTTGCTACACGAGCGAGGACCGGA
GGCTTGTTTTTTGGCTCTTGGGGGTTCTGAAAGAAGTAGAGGTTCGGGATGGGTGGAGGAGTGCTGTATCCCCAAATCTCATGGCCTCTATCTCCCT
GACTCAGCTCACCCCAGAGGAAGAGGAGAAGCGAAGGGTGCGCCGGGAACGAAATAAACTAGCAGCAGCTAAATGCAGGAACCGGCGGAGGGAGCTG
ACCGACCGACTCCAGGCGGTGAGGACAGGCCCTGGGGTGGGAGAGGGGATGTTGAGGGGAGCTCTCTCCCCATTCTCTGCCCCCTCTCCACCTGTAC
CCTTATCCTGGGTTGAGAACTAGACGTTCCACACATGGAACTAGGTACTGCTGTGGCCAGACTGGGTAGCCCAGGGCACAAACACAGACCCCCATGG
ACTTAAGTCAACTCCTGGTCCCCCCCCCATTTCCTGACCCCACGGACTACTCTCCTAGCCTTCATTTCATCCCAAGGGGCCACATGGGGCCCTTGAG
GAGAGGGGCGCCCCCATCATTTCTCCCATCTGGTCTTCAGCAAGTAACAACCCATTTTGCCTCAGTTTCTCCATCTCTGCAAACCCTCATCAAATCT
CCCGGGCTCTTTCTACCCTTAACACTCTGGAAAGCCTGTGAAATGAAATTATTCCACCTCCTGCCCTAGCCACCCACAGCTCTCCTGGTGCTGGTGG
CATCCCCCAAAACCCACTCCCTTCCTACGTCCTCCCTTGGTCTGAGAGTTCCCTGCTGTATGCCTGCAGGGTGAGCTGTTACTCCTTGAGGGAACAA
GGGAATTGTCAACTTTCCTTCTCTACTTTTTCTCTTCCCCGGGAGGTAGAGAGGGAGGGGTAATAGAAGGGAACACATTAAAAACACATAACAGTGG
CTCATGCCTGTGATCCCAGCACTTTGAGAGGCCAAGGCAGGAGGATTGCTTGAGCCCAGGAGTTTGAGACCAGCCTGGGAAACATAGGGAGGACTTG
TCTCTACCAAGAAAAAAAAAAATTAGTTGGGCATGGTGGTGCACACCACTGTGGTCCCAGCTACTATGGAGGCTTTAGTGGGAGGATCGCTTGAGCC
GAGGAGGTCCAGGCTGCAGTGAGCCATGATTGCACTATTGCACTCCAGCCTGGGGGACAGAGCGAGACTCTGGCTCAAAAGCAAAACAAAACCAACC
ACATAACGATTGTTCATTCATTCAACAAACCTCCTGCACACCAGAAACTTCCCCATAAACCTGGCCCCTTCTGTACCATCCTTTGGACAGATGGGGG
AAACTGAGGTTCCTGGAAGGCAAGACCCTTGCCCCAACTCCCATGGCCACCAGGACTCCATCTCAGGAGGTGTTTTTTCTCAGCCCGGGGCTGCCTT
CCAGCAGCAAGTCCAAGGGAGCCATGACCCGAGTTTCCCGGTCACTGACATGCTTTTTTCTCCTTCCTCTCTCTCTTCTGTGACCTGGCCTCCCTGG
CCTCAGGAGACAGATCAGTTGGAGGAAGAAAAAGCAGAGCTGGAGTCGGAGATCGCCGAGCTCCAAAAGGAGAAGGAACGTCTGGAGTTTGTGCTGG
TGGCCCACAAACCGGGCTGCAAGATCCCCTACGAAGAGGGGCCCGGGCCGGGCCCGCTGGCGGAGGTGAGAGATTTGCCGGGCTCAGCACCGGCTAA
GGAAGATGGCTTCAGCTGGCTGCTGCCGCCCCCGCCACCACCGCCCCTGCCCTTCCAGACCAGCCAAGACGCACCCCCCAACCTGACGGCTTCTCTC
TTTACACACAGTGAAGTTCAAGTCCTCGGCGACCCCTTCCCCGTTGTTAACCCTTCGTACACTTCTTCGTTTGTCCTCACCTGCCCGGAGGTCTCCG
CGTTCGCCGGCGCCCAACGCACCAGCGGCAGTGACCAGCCTTCCGATCCCCTGAACTCGCCCTCCCTCCTCGCTCTGTGAACTCTTTAGACACACAA
AACAAACAAACACATGGGGGAGAGAGACTTGGAAGAGGAGGAGGAGGAGGAGAAGGAGGAGAGAGAGGGGAAGAGACAAAGTGGGTGTGTGGCCTCC
CTGGCTCCTCCGTCTGACCCTCTGCGGCCACTGCGCCACTGCCATCGGACAGGAGGATTCCTTGTGTTTTGTCCTGCCTCTTGTTTCTGTGCCCCGG
CGAGGCCGGAGAGCTGGTGACTTTGGGGACAGGGGGTGGGAAGGGGATGGACACCCCCAGCTGACTGTTGGCTCTCTGACGTCAACCCAAGCTCTGG
GGATGGGTGGGGAGGGGGGCGGGTGACGCCCACCTTCGGGCAGTCCTGTGTGAGGATTAAGGGACGGGGGTGGGAGGTAGGCTGTGGGGTGGGCTGG
AGTCCTCTCCAGAGAGGCTCAACAAGGAAAAATGCCACTCCCTACCCAATGTCTCCCACACCCACCCTTTTTTTGGGGTGCCTAGGTTGGTTTCCCC
TGCACTCCCGACCTTAGCTTATTGATCCCACATTTCCATGGTGTGAGATCCTCTTTACTCTGGGCAGAAGTGAGCCCCCCCCTTAAAGGGAATTCGA
TGCCCCCCTAGAATAATCTCATCCCCCCACCCGACTTCTTTTGAAATGTGAACGTCCTTCCTTGACTGTCTAGCCACTCCGTCCCAGAAAAACTGGC
TCTGATTGGAATTTCTGGCCTCCTAAGGCTCCCCACCCCGAAATCAGCCCCCAGCCTTGTTTCTGATGACAGTGTTATCCCAAGACCCTGCCCCCTG
CCAGCCGACCCTCCTGGCCTTCCTCGTTGGGCCGCTCTGATTTCAGGCAGCAGGGGCTGCTGTGATGCCGTCCTGCTGGAGTGATTTATACTGTGAA
ATGAGTTGGCCAGATTGTGGGGTGCAGCTGGGTGGGGCAGCACACCTCTGGGGGGATAATGTCCCCACTCCCGAAAGCCTTTCCTCGGTCTCCCTTC
CGTCCATCCCCCTTCTTCCTCCCCTCAACAGTGAGTTAGACTCAAGGGGGTGACAGAACCGAGAAGGGGGTGACAGTCCTCCATCCACGTGGCCTCT
CTCTCTCTCCTCAGGACCCTCAGCCCTGGCCTTTTTCTTTAAGGTCCCCCGACCAATCCCCAGCCTAGGACGCCAACTTCTCCCACCCCTTGGCCCC
TCACATCCTCTCCAGGAAGGGAGTGAGGGGCTGTGACATTTTTCCGGAGAAGATTTCAGAGCTGAGGCTTTGGTACCCCCAAACCCCCAATATTTTT
GGACTGGCAGACTCAAGGGGCTGGAATCTCATGATTCCATGCCCGAGTCCGCCCATCCCTGACCATGGTTTTGGCTCTCCCACCCCGCCGTTCCCTG
CGCTTCATCTCATGAGGATTTCTTTATGAGGCAAATTTATATTTTTTAATATCGGGGGGTGGACCACGCCGCCCTCCATCCGTGCTGCATGAAAAAC
ATTCCACGTGCCCCTTGTCGCGCGTCTCCCATCCTGATCCCAGACCCATTCCTTAGCTATTTATCCCTTTCCTGGTTTCCGAAAGGCAATTATATCT
ATTATGTATAAGTAAATATATTATATATGGATGTGTGTGTGTGCGTGCGCGTGAGTGTGTGAGCGCTTCTGCAGCCTCGGCCTAGGTCACGTTGGCC
CTCAAAGCGAGCCGTTGAATTGGAAACTGCTTCTAGAAACTCTGGCTCAGCCTGTCTCGGGCTGACCCTTTTCTGATCGTCTCGGCCCCTCTGATTG
TTCCCGATGGTCTCTCTCCCTCTGTCTTTTCTCCTCCGCCTGTGTCCATCTGACCGTTTTCACTTGTCTCCTTTCTGACTGTCCCTGCCAATGCTCC
AGCTGTCGTCTGACTCTGGGTTCGTTGGGGACATGAGATTTTATTTTTTGTGAGTGAGACTGAGGGATCGTAGATTTTTACAATCTGTATCTTTGAC
AATTCTGGGTGCGAGTGTGAGAGTGTGAGCAGGGCTTGCTCCTGCCAACCACAATTCAATGAATCCCCGACCCCCCTACCCCATGCTGTACTTGTGG
TTCTCTTTTTGTATTTTGCATCTGACCCCGGGGGGCTGGGACAGATTGGCAATGGGCCGTCCCCTCTCCCCTTGGTTCTGCACTGTTGCCAATAAAA
AGCTCTTAAAAACGCATTCGCCAGGCTACAGTGTTTATTTCCTCCTAACACCCATTGCCTGGCTTCCTTTTAGTAAGAGAGGATGAGGTTAGATTGT
CGAAGGACTACACACACACAGAGATCATACACCCATGCACACACACACACAGACACACACCTATGCAGGAACTCCTTCTAGTCAATGGGTCTACAGC
AGGATAAAAGGAAGGCAGACAGTCAGGAGGACTTCCTGTACTCGCAGGCAGTGCCTCCTACTAGAAAAAGTAAGTGGCTACAGCTGGGCGCAGTGGC
TTGCGCCTGTAATCCCAGCATTTTGGGAGGCCAAGATGGGCGGATCACTTGAGGTCAGGAGTTTGAGACCAGCCTTGCCAAGATGGTGAAACCCTGT
CTCTACAAAAAATACAAAAATTAGCCTGGTGTGGTGGTGCACACCTGTAATCCCAGGCTACTTGAGAGGTTGAGGCAGGAGAATCACTTTAACTTAG
GAGGCAGAGGTTGCAGTGACACAAGATTGCACCACTGCACTCCAGCCTGGGTGACAAAGTGAAACTGTCAAAAAAAAAAAAAAAAGTAAGGGGTCAG
AAGGTTAGCCTGCAGGTGTGGGATCACAGAGGTCTCCTAGTGATGGAGCTTGTATGCTCTATGGGTTAAAAACAGACGCTAAGGAGATAAACTATAC
ACAGAAGAAGCTTAATGGGCTGTGCACAGTGGCTTGCACTTGCAATCCCAGCTCTTTCGGAGGCCGAGGTAGGAGGCTAGGAGTTCGAGAACAGCCT
GGGGCAACATAGTGAGACACCCCCCACCCCAACCCATCTCATTATGTTCAGAAAAAAAAAAAAAAGAGGATCTTGAGAAACTTGCACAGCAAACTAC
TAAAGACCACTCAGGCTAGGAATGAGGCGTCATCTTGGATTTTTTACAAACTACAACTACAAAAAACAATTATTTTACACTGAAGATGTGTTTCCTT
TTGTTTTCCATATGACCACTATTGGGGCCAACCCAAGACTGACTGAAGCAAATATATGACCATTTTTTTTTTTTACACATAGAGTGGAGCCATCCCC
ATTGCAAAATCCTAGCCGTCTCTTATTTGCATAACAGCAAGTCCTCTGGGAATTGAGGTGAGGGTCCAGGGGTCGCTCAGACGCTTTGGTAAATCAA
TAAGCAAGGGAATTTGTCATGGTGGAATCCATTTATTAATTCACTCAAAAAAATGTGCTAAGCACCTACCCAACTGTGCTGGGAGTTGGGGACACTA
TAGGGACTGAGCCTCAGGTCTTGCCCTCCTGGGGCTCACAGTCCATTGGGGGACACACACCGTTGCCAGTCAGGGACAACCTAAAGTGGATTGGGTT
TGGGAAGCCCATGGGGCTAGGGAAGCACAGCAGGGACACCTAGCTTGGACTGGGAGTCGGGAAAAACTTCCTGGCGGAGGGGACAGCTGAGCTGAGT
CCTAGAGGAGGATAGAGAGTATAGAAAGAAATAGAAAAAGGCCAAGGCCAAGAAAATAGCACAGCCATAGATCTGTTGGTGGGGAGAAGGCTTGATA
CATTGAGAACGCTTAGAGGGTCGGGTGCGATGGCTCATGCCTGTAATCCCAGCACTTTGGGAGGCCGAGGTGGGTGGATCACCTGAGGTCAGGCATT
CAAGACCAGTCTGGCCAACGTGGCGAAACCCCGTCTCTACTAAAAAATATATATATATATATACAAAAAATTAGCTAGGCATGGTGGTGGGCACCTG
TGATCCCAGCTACTCGGGAGGCTGAGGCAGGAGAATCGCTTGAACCTGGAAAGTGGACATTGCAGTGAGCTGAGATTGTGCCACTGCACTCCAGCCT
GGGCAACACAGCGAGACTCTGTCTCAAAAAAAAAAAAAAAAGAAAGAAAAAAAAGAGAAAACTCAGAGATTCGTGGAGACTGGAACCACGGGTGTGG
AGAGAGGGGTTAGTAGAGACCAGATTCTGCAGGTACTATAATGACATTCCCAGGCTAAGGAGTTTAGATCTTTTCTTCAGGGCACTGGGGAGCTATT
ACTGAGCAGGAGACCAGGGAGGAAGTGGGGTGGGGACCCTGCAGGGTGGGGTGAGGAGGAGTCCAGAACAGGGCCAGGGACATGGGACAGAGAGGAG
GGGAAGGATTCAGGAGACACTCGGGAGGCAGGACAGTTGGGCTTGGTGAGCAGCCGGCTTGGGAAGGAAAATACAGGGCAGTAATAAATAGCATGGG
TCAAGTGGTCTGAGTGAGGCTGGGAGTGGTGGCACGCACCTATGGTCCCAGCTACTCAGGAGGCTGAGGTGGGAGGATTGCTTGAGCCTGGAAGTTT
GAGGCTGCAGTGAGCTATGATCGTACCGCTGCACTCCACTTTCGGTGACAGAGTAAGACCCTGTCTCAAAAAAAAAAAAAAAAAGGAAAAAAAAAAA
AAGACACTGCCTATGAGTTAACCCTGCTCTACAAGGAGCAGTTTTTAAAGTAAAATTAAAAAAAAAAAAAAAAAAGAAAGAAAGAAAGAAAGAAAGA
GAGAGAAAAAAGAAAAAAGGCTGGGTTGCCTTGGACAACAGACTTCATCTCCCTGAGCCTCCATTTCCTCATCTGTAGAATGGGGGCTGTTAAGAGG
AGTTGCAAGGCTTGTGCATGCCAGCAGTAAGTGCAGAGTGACGGTGCAATTATCATTACCCCCATCATCTTTATTGGGGTCAGCCTGAACCCTCGAT
ATCCCATAATATTCACCCCCATCCTTCAAGGGTCTGCCCTAATGTTCCCATGACACCCGACCAGCTCAGCTCTCCTTATGAGAGGGCCTCACTTTTC
TATTCCCTTTGCAGCCGTTATCCCCTTTGTAGTTGTTAATTAAGTGTGTAATTACATGATGGCTTAATGTTTGTCTCCCCCACTGGGCTGACTGCAC
CAGGAGACCAAGGCCAGGGCTGTCACCCACCGCTGCGTCCTCAGCAAATGCTTGTTTGATGAGTGAATGACAGATGAACAAATGGGCAAGTATTTGA
CTGATTAATCACGGCATGCGTGATTAAATAAATGAGTGAGCAAACGACTGAATGAGTAAGCAATTGAAGGGGAGAGATCTAGGATAATTTCCAAACT
GCCAATATCCCAGAACTGGGTAGATGACTTTTTCTCCGTCTTTTGGAGTGGGTTTTTATACTCCGGAGGGGGAAATAAGTAACGACAATCAGAGATC
GGAGTGACAGAGAATGAGTTTGCGATGCGGAAGGCCGCAGCGACCTCTCCAGGTGCAGGCTGGAGGAGCGCCTCCCGGGCAACAAGCAAAATAAGTC
CGGTTCGATAAGTAAGATTCAAGGCGCTTAGTTACTACCGCCCGAAAGGTGGAATTGAACCACTCTGTCGCTAGACAGCTACAGGTTTGAAGCCTGC
ACCCCAGACCACTGAGGATCATCCGGGCAGGACAACCTTCTTCCCGCGCAGCTATATAAGGATCGCAAAAGCTTACCTTTTAGAGTTATGGTCGCGT
CCTTTGGAAAGGTGTGAGATGGTTGACTTCAAGGGCTATAAGTTCTCCCCACTCATTTATCGTGAGAGATGTCCTTGTAAAACGTTGCCTTCACTTC
ATATAGTATGAATCATCCTCGCTCCCCAAACCGTCTCATTTACATAGCGCCACGCATTCTGGGAAGCAGCGTTTGAGCACCTGGCAAGCTGTTAAAG
GGCCCAGGACCCCCTTTTTCCAAAATGAAAAGTCAGCTTTTTAAGAGGAGAGATTCATGATTCGGCATTCAGAAGCGCCTTCTCGGAAAATTCCGAA
TTCTCTTTCTGCGGAGGAGTGGTGAGTGGGTTCCTGTTAGAGTCTGATTCACCCTGGCCCCAAAGGCGCTGAGCAGGCGGCTATAGGGCTGGTGCGA
CACCTGCTGTTCTTTTATGGAATTGCGTAGGCCGATGGAGCTCCGCGTTCATTCAAACGTTTATTGAGCGTCTACTGAGTCCCAGGAACTGTCTCGG
TGGTGGTGACGACAGACATCCTGTCCCGATTGAGTTTAAACACTAGACATAACCAATTTCTGCACTTGCGTTTTATGGTTGGAGAAACTGAGACAGA
CTCAGAAACGGATAGTACCATATTCCGGTTAAAACAGCCCATCCACTTAGGGAAATCGAACTTGTGTTACAATTTTTATTACAAAAAAGGTGATTCT
TTTTTCTTAAATTTTTACATATTTAGGAGGTACAGGTGCCGATTTCTACATGCATATGTTGATTGCATCGTGGTGAAATCTGGGCTTTTAGGTGTAC
TCATGACGAAAAATTATTCAATATTCTAAGTCAGTGATTCTTTGACAATACCATTCTCCTGCATGAAACTCTCCCATGACTTCCATTTCAGAGTAAA
AGTCAAAGTACTCACCCTGCTTTACAAATCCCTGTAATCCAGCCCCTTTGGTCCCTCTGACCCTGTCTGACATACTCCTCTTCCCTTGGATATTATT
GGATTTAGGCACACAGATGTCTTGCTGCACACATGGATCATGCTACCACCACAGGGACTTTGTGCTTGCCGATCCCCTAGCCTGGATCTCCTCTTCA
CATGTTCCCATGGCTCATCGCGTCCCTTCACTCTGTCATCTGATCAAATGTCAATACCAAAAACTCACTGAGTGACCAGCACTCAGTGGGGCCTTCC
CTGATCCCAGTTTAAAATAGCGAGTGGCGGCCGGGCGCGGTAGCTCACGCCTGTAACCCCAGCACTTTGGGATGCCAAAGCGGGTGGATCACGAGAT
CAGGAGATGGAGACCATCCTGGCTAACACGGTGAAACCTTGTCTCTACTAAAAATACAAAACATTAGCTGGGCGTGGTGGCGGGCGCCTGTAGTCCC
AGCTACTCGGGAGCCTGAGGCAGGAGAATGGAGTGAACCCGGGAGGCGGAGCTTGCAGTGAGCTGAGATTGCTCCACTGCACTCCAGCCTGGGGGAC
AGAGCGAGGCTCCGTCTCAATAAATAATAAATAAATAAAATAGCTAGTGGCTGGGATCGGTGGCTCAGGGCGTGTAATCCCAGAACTTTGGGAGGCC
GAGGCGGGTGGATCACCTGAGGTCAGGAGTTCGAGGCCAGCCTGGCCAACATGGTGAAACCCCGTCTCCACGAATGATACAAAAATTAGTCAGGCAT
AGTGGCTCACGCCTGTAATCCCAGCTACTCGGGAGTTTGAGGCAGGAGAACCGCTTGAACCGGGGAGGCAGAGGTTGCAGTGAGCTGAGATGGTGCC
ATTGTACTCCAGCCTTGGTGAAAAGAGCAAAACTCCATCTCCAAATAAAAGTAATAATAATAATAAATAAAATAAAAATTTTTAAAAAGCGAGCTCT
GTCACTCTATCCCCTTACCCTGCTAGACATTTCCCCACCACTCTGATCACCACCTGCCATTTTCTGTGTCTATTTGCTTACCGTCTGTCTGCTTCTG
TAGAATATCAGCACCATGAAACTATGCACTTTATTTTTGATCATTGCTGTATCTCTAGTGCCTAAAAAGTGCTTGAGAACATAGCAGATGTTCAGTA
AATGTTTGTGGAATGAATAAAAGAATATCATCACTGTCTTTTTTTCATTCTTCTTCCAGACAGGATCTTACTTTGTCACCCAGGCTGGAATGCAGTG
GCGCAAAAACGGCTCACTGCAGCCTCGACCTCCCAAGCTCAAGTGATCCTCTTGCCTCAGCCTCCCTGGGATGACAGGCATATACCATCACGCCCAG
CTAATTTTAATTTTTTTTGTAGAAACAGGGGCCTCACTTTGTTGCCCAGACTGGCCTCGAACTCCTGGCCTCAAGTGATGCTTCTGCCTTGGGCTCC
TAAAGTGCTGGAATTTCACGCGTGAGCCACAGCACCTGGCCTCACTATCCTTCTTTCAGCCTCAGTTTTCTCATTTGTATAACCAGACTAGTACAAC
TGATCTCACTGGAGAAATCATGATATAAAATTCTGACACTGGCTGAGGCAACTGGGAGGAGCTCAGTAAAGGCTGTTTCTGCTGGGCACGGTGGCTC
ACACATGTAATCCCAGCACTTTGGGAGGCCGAGGTGGGTGGATCACAGGAGATTAGAAGTTCCAGACCATCTGGCAAGCATGGTAAAACCCCATCTC
TACTAACAATTCAAAAAGTAGCCAGGCATGGTGGCTCACACCTGTGATCCCAGCTACTCGGGAGGCTAAGGCAGGAGAATCCCTTGAACCCAGGAGG
CTGAGGTTGCAGTGAGCCAAGATTGTGCCACTGCACTCCATCCTGGGCGACAGAGCAAGACTCTGTCAAAAAAAAAAAAAAAGTTTTTTTTTTTTGG
CTGGAATTACAGGCGCCTGCCCCCACACCTGGCTAATTTTTGTTTTTTGTTTTTTTAGGAGAGACGGGGTTTCACCATGTTCACCAGACTGGTCTTG
AACTCCTGACCTCAGGTAATCCAACTGCCTCAGCTTCCCAAAGTGCTGAGATTACAGGCGGGAGCCACTACACCTGGCCAATAAAGGCCGTTTCAGT
CTTCAATCTGTTTTGAGCTTGGAGGCTTTAGTCATTCCCAGACCCAAAATCTCAATCAGACCCTCTTCCACCACTTTTTGTGATAGATCAATAAACA
TTTTGTCTTATGGGAAGTTTAACTAAGAGTATCTTTAGAAAGTTTTGGACAGGCGCTGTAATCCCAGCACTTTGGGAGGCCGAGATGAGCGGATAGC
TTGAGCCCAGGAGTTAGAGACAAGCCTGGGCAACATAGTGAGACTCTGTCTCAAAAAAAAAAAAAAGAAAGAAAGGAAAAGAAAAAAAGAAAAAAAA
AGTATTCCCTCTGCTTGGCAAATCCAGATTCAAGATATATCCCCTAAACCCTCTTTGTTTTAATTAGATAGTTGCTGCTAGGCACCTCTGTATACAA
ATTCTGAGGATGTAAGGACTCCTTGGAACACCGTTATCTGTCTCCTAATATGTGACGTGTGTATGACGAACAAGTGAGTTTTTTTTTTTTTTGTTTC
TTTTTTTTGGTTTTTTGTTTTGAGACGCAGTCTCGCTCTGTCGCCCAGGCTGGAGTGTAGTGGCGCGATCTTGGCTCACTGCAAGCTCTGCCTCCCA
GGTTCACGCCATTCTCCTGCCTCAGCCTCCCTAGTAGCTGGAACTACAGGCGCCCGCCACCACTCCCGGCTAATTTTTTTGTATTTTTAGTAGAGAC
GGGGTTTCACCGTGTTAGCCAGGATGGTCTCGATCTCCTGACGTCATGATCTGCCCGCCTCGGCCTCCCAAAGTGCTGGGATTACAGGCGTAAGCCA
CCGAGCCCGGCTTTTTTTTGAGATGGAGTTTCCCTCTTGTTGCTCAGGCTGGAGTGCAGTGGTGTGATCTCGGCTCACTGCAACTTCCGCCTCCCGG
GTTCAAGCGATTTTCCTGCCTCAGCCTCCCAAGTAGCTGGGATTACAGGCATGCACCACCACGCCCGGCCAATTTTGTATTTTTAGTAGAGACATGG
TTTCTCCATGTTGGTCAGGCTGGTCTCCAACTCCCGACCTCAGGTGATCCACCTGCCTTGGCCTCCTAAAGTGCTGAGATTACAGGCGTGAGCCACT
GCGCCTGGCTGCACAAACATTTTAAACGTCAATATTTTTGTGTTTATTTTTACTATTGTCTTCTATTTCTGGCAAGCAATACTGGTTTCTGGTGGCA
AGGTAACCTTTCTTCTTAAAATACATTTGTTATTATATTATTAAATATTAAACCAATTTTCAAGAAAAATATTAGATAAATAGCAGAACAGGTTGTA
GAAAGATGAAGGTCATGTGGGGAATGACTGAGGTTTGGGAAACAATATTATAACTCCTTACTGTGCATTTATTATATGCCAGGCCCAATGCCAAGGG
CTTTACATGTAGGTATAGTTATGGTTGACAGTTTTCTTCTTTTTCTTTTCTTTTTTTTTGAAACAGGGTCTTGCTCTGTCGCCCTGTCTGGAGTGCA
GTGACGCAATCTCAGCTCACTACAACCTCCACCTCCTTAGTTCAAGTGATTCTCCTGCCTCAGCCTCCCGTGTAGCTGGTCTTACAGGTGCCCACCA
CCACATCCGGTATTTTTAGTAGGGACGAGGTTTTACCATGTTGGCGAGGCTTGTCTTGAACTCCTGACCTCAGGTGATCCACCTTCCTTGGCCTCCC
AAAGGCTGGGATTACAGGTGTGAGCCACTGCACCTGGCCTCTTTTTTTCTTACTTAATTTTTTTGTAGAGATGAGGTCTATGTTGCCCAAACTTGTC
TCGAACTCCTGGCCTTAAGTGATCCTCCCTCCTTGGCCTTCCAAAGTGCTGGGATTGCAGACGTGAGCCATCGTGCCCGGCCTAATAAGTTTTCCAT
TTGAGGAAACTGAGGCTTTGAGAGATGAAGTCATATGCTCAAGGTCATACAGCGAAGGGGTAGTAGAGCCAGGATTCAAACCCAAGTCTGTGGATCT
TTAGACCTCAGTGTTCTCCCAGTCTCCCCACGGGTCCCTTTGCTTCATCCTTTCCGAGTTTAGTTGTCTTTTTTGTTGTTGTTCTTGTTGTTGCTGT
TTTTTGATAGAGTCTCGCCCTGTTGCCCAGGCTGGAGTGCAGCGGCATGATCCTGGCTCACTGCAACCTCTGCCTCCTGGGTTCAAGTGATTCTCCT
GCCTCAGGCTCCCGAGTAGCTGGGATTACAGGTATGCGCCGCCACACCCAGCTAATTTTTGTATTTTTAGTAGAGATGGAGTTTCATCATGTTGGTC
AGGCTGGTCTGGAACTCCTGACCTCAGTGATCTGCCCACCTTGGCCTCCCAAAGTGCTGGGATTACAGGCGTGAGCCACTACGCCCAGTATGTAGTT
TTTTTGTGTTTTGTTTTTGTTTTTGTTTAGAGACAGGGTCTCCCTCTGTAACTCAGGCTGAAGTGCAGTGGTGTGATCATAGCTCTCTGTAACCTCG
AACTCCTGGCCTCAAGCAATTTTCCTGTCTTAGCCTCCCAAGTACCTGGGACTACAGGCATGCACCACCACGCCCGGATAAATTTTTTTTTTTTTTA
GAGACGGGGGTCTTGTTATGTTGCTCAGGGTGGTCTCGAACTTTTGGCCTCAAGTGATCTTCCCACATTGGCCTCCCGAAGTGTTGGGATCACAGAT
GTGAGTCATCATGCCAGGCCTCAGATTAGTGTTGAAACTGGAAGTCCAGGGAGGCCCTGTATTTGTTCCCGAGGGAATCAGGGTGGGGAGACGTGGG
TGGATGAGAGAAGTTTGTGAGGCAGGATAGACACAGCATTGTGACTGATTGTTTGTGGGAGGTGAGTGTGTAGAAGTCCAGAGCCATACCTGGGTGT
CTGGCCTGGTGACACCGTGGGCAGTGAAAACATCTCTGAGTTGGAAATCAGGTAGGATGAAGAAGACGTTTGGTTAGATTTAGGGTGGAAGGGGCAT
CCAGAGGCCGTTGGACACGTGGGTTTGGGCTCAGTTGAGGTGGCTGCACAGTAGGCAGGGTGTGGGATCCATTAGTGATGTCTGCCTTGAGCACAGG
CATGGGAGTGGCTGCCAAGGCTTGGCTAACCCTGGAATGGGTGGTCTGTCAGCATCTTCCCCTCAATCATTTCTTTGTTTTTTTTTTTTTTTGAGAC
AGAATCTCGCTCTGTCGCCGAGGCTGGAGTGCAGTGGCGCAATCTTGGCTCACTACAACCTCCATCTCCCAGATTCAAGCGACTCTCATGCCTCAGC
CTCCCGAGTAGCTGTGATTACAGGCATGCACCACCACACCCGGCTAAATTTTGTATTTTTAGTAGAGATGAGGTTTCACCATGTTGGCCAGGCTGGT
CTTGAACTTCTGGTCTCAAGTGATCCGCCCTCCTCGGCCTCCCAAAGTGCTGGGATTACAGGCGTGAGCCACTGCGCCCGGCCTCCCCTCAATCATT
TCATAACCTACACAGATGGCAGAG
HUMAN SEQUENCE - mRNA
CATTCATAAGACTCAGAGCTACGGCCACGGCAGGGACACGCGGAACCAAGACTTGGAAACTTGATTGTTGTGGTTCTTCTTGGGGGTTATGAAATTT
CATTAATCTTTTTTTTTTCCGGGGAGAAAGTTTTTGGAAAGATTCTTCCAGATATTTCTTCATTTTCTTTTGGAGGACCGACTTACTTTTTTTGGTC
TTCTTTATTACTCCCCTCCCCCCGTGGGACCCGCCGGACGCGTGGAGGAGACCGTAGCTGAAGCTGATTCTGTACAGCGGGACAGCGCTTTCTGCCC
CTGGGGGAGCAACCCCTCCCTCGCCCCTGGGTCCTACGGAGCCTGCACTTTCAAGAGGTACAGCGGCATCCTGTGGGGGCCTGGGCACCGCAGGAAG
ACTGCACAGAAACTTTGCCATTGTTGGAACGGGACGTTGCTCCTTCCCCGAGCTTCCCCGGACAGCGTACTTTGAGGACTCGCTCAGCTCACCGGGG
ACTCCCACGGCTCACCCCGGACTTGCACCTTACTTCCCCAACCCGGCCATAGCCTTGGCTTCCCGGCGACCTCAGCGTGGTCACAGGGGCCCCCCTG
TGCCCAGGGAAATGTTTCAGGCTTTCCCCGGAGACTACGACTCCGGCTCCCGGTGCAGCTCCTCACCCTCTGCCGAGTCTCAATATCTGTCTTCGGT
GGACTCCTTCGGCAGTCCACCCACCGCCGCGGCCTCCCAGGAGTGCGCCGGTCTCGGGGAAATGCCCGGTTCCTTCGTGCCCACGGTCACCGCGATC
ACAACCAGCCAGGACCTCCAGTGGCTTGTGCAACCCACCCTCATCTCTTCCATGGCCCAGTCCCAGGGGCAGCCACTGGCCTCCCAGCCCCCGGTCG
TCGACCCCTACGACATGCCGGGAACCAGCTACTCCACACCAGGCATGAGTGGCTACAGCAGTGGCGGAGCGAGTGGCAGTGGTGGGCCTTCCACCAG
CGGAACTACCAGTGGGCCTGGGCCTGCCCGCCCAGCCCGAGCCCGGCCTAGGAGACCCCGAGAGGAGACGCTCACCCCAGAGGAAGAGGAGAAGCGA
AGGGTGCGCCGGGAACGAAATAAACTAGCAGCAGCTAAATGCAGGAACCGGCGGAGGGAGGTGACCGACCGACTCCAGGCGGAGACAGATCAGTTGG
AGGAAGAAAAAGCAGAGCTGGAGTCGGAGATCGCCGAGCTCCAAAAGGAGAAGGAACGTCTGGAGTTTGTGCTGGTGGCCCACAAACCGGGCTGCAA
GATCCCCTACGAAGAGGGGCCCGGGCCGGGCCCGCTGGCGGAGGTGAGAGATTTGCCGGGCTCAGCACCGGCTAAGGAAGATGGCTTCAGCTGGCTG
CTGCCGCCCCCGCCACCACCGCCCCTGCCCTTCCAGACCAGCCAAGACGCACCCCCCAACCTGACGGCTTCTCTCTTTACACACAGTGAAGTTCAAG
TCCTCGGCGACCCCTTCCCCGTTGTTAACCCTTCGTACACTTCTTCGTTTGTCCTCACCTGCCCGGAGGTCTCCGCGTTCGCCGGCGCCCAACGCAC
CAGCGGCAGTGACCAGCCTTCCGATCCCCTGAACTCGCCCTCCCTCCTCGCTCGGTGAACTCTTTAGACACACAAAACAAACAAACACATGGGGGAG
AGAGACTTGGAAGAGGAGGAGGAGGAGGAGAAGGAGGAGAGAGAGGGGAAGAGACAAAGTGGGTGTGTGGCCTCCCTGGCTCCTCCGTCTGACCCTC
TGCGGCCACTGCGCCACTGCCATCGGACAGGAGGATTCCTTGTGTTTTGTCCTGCCTCTTGTTTCTGTGCCCCGGCGAGGCCGGAGAGCTGGTGACT
TTGGGGACAGGGGGTGGGAAGGGGATGGACACCCCCAGCTGACTGTTGGCTCTCTGACGTCAACCCAAGCTCTGGGGATGGGTGGGGAGGGGGGCGG
GTGACGCCCACCTTCGGGCAGTCCTGTGTGAGGATGAAGGGACGGGGGTGGGAGGTAGGCTGTGGGGTGGGCTGGAGTCCTCTCCAGAGAGGCTCAA
CAAGGAAAAATGCCACTCCCTACCCAATGTCTCCCACACCCACCCTTTTTTTGGGGTGCCCAGGTTGGTTTCCCCTGCACTCCCGACCTTAGCTTAT
TGATCCCACATTTCCATGGTGTGAGATCCTCTTTACTCTGGGCAGAAGTGAGCCCCCCCTTAAAGGGAATTCGATGCCCCCCTAGAATAATCTCATC
CCCCCACCCGACTTCTTTTGAAATGTGAACGTCCTTCCTTGACTGTCTAGCCACTCCCTCCCAGAAAAACTGGCTCTGATTGGAATTTCTGGCCTCC
TAAGGCTCCCCACCCCGAAATCAGCCCCCAGCCTTGTTTCTGATGACAGTGTTATCCCAAGACCCTGCCCCCTGCCAGCCGACCCTCCTGGCCTTCC
TCGTTGGGCCGCTCTGATTTCAGGCAGCAGGGGCTGCTGTGATGCCGTCCTGCTGGAGTGATTTATACTGTGAAATGAGTTGGCCAGATTGTGGGGT
GCAGCTGGGTGGGGCAGCACACCTCTGGGGGGATAATGTCCCCACTCCCGAAAGCCTTTCCTCGGTCTCCCTTCCGTCCATCCCCCTTCTTCCTCCC
CTCAACAGTGAGTTAGACTCAAGGGGGTGACAGAACCGAGAAGGGGGTGACAGTCCTCCATCCACGTGGCCTCTCTCTCTCTCCTCAGGACCCTCAG
CCCTGGCCTTTTTCTTTAAGGTCCCCCGACCAATCCCCAGCCTAGGACGCCAACTTCTCCCACCCCTTGGCCCCTCACATCCTCTCCAGGAAGGCAG
TGAGGGGCTGTGACATTTTTCCGGAGAAGATTTCAGAGCTGAGGCTTTGGTACCCCCAAACCCCCAATATTTTTGGACTGGCAGACTCAAGGGGCTG
GAATCTCATGATTCCATGCCCGAGTCCGCCCATCCCTGACCATGGTTTTGGCTCTCCCACCCCGCCGTTCCCTGCGCTTCATCTCATGAGGATTTCT
TTATGAGGCAAATTTATATTTTTTAATATCGGGGGGTGGACCACGCCGCCCTCCATCCGTGCTGCATGAAAAACATTCCACGTGCCCCTTGTCGCGC
GTCTCCCATCCTGATCCCAGACCCATTCCTTAGCTATTTATCCCTTTCCTGGTTTCCGAAAGGCAATTATATCTATTATGTATAAGTAAATATATTA
TATATGGATGTGTGTGTGTGCGTGCGCGTGAGTGTGTGAGCGCTTCTGCAGCCTCGGCCTAGGTCACGTTGGCCCTCAAAGCGAGCCGTTGAATTGG
AAACTGCTTCTAGAAACTGTGGCTCAGCCTGTCTCGGGCTGACCCTTTTCTGATCGTCTCGGCCCCTCTGATTGTTCCCGATGGTCTCTCTCCCTCT
GTCTTTTCTCCTCCGCCTGTGTCCATCTGACCGTTTTCACTTGTCTCCTTTCTGACTGTCCCTGCCAATGCTCCAGCTGTCGTCTGACTCTGGGTTC
GTTGGGGACATGAGATTTTATTTTTTGTGAGTGAGACTGAGGGATCGTAGATTTTTACAATCTGTATCTTTGACAATTCTGGGTGCGAGTGTGAGAG
TGTGAGCAGGGCTTGCTCCTGCCAACCACAATTCAATGAATCCCCGACCCCCCTACCCCATGCTGTACTTGTGGTTCTCTTTTTGTATTTTGCATCT
GACCCCGGGGGGCTGGGACAGATTGGCAATGGGCCGTCCCCTCTCCCCTTGGTTCTGCACTGTTGCCAATAAAAAGCTCTTAAAAACGC
HUMAN SEQUENCE - CODING
ATGTTTCAGGCTTTCCCCGGAGACTACGACTCCGGCTCCCGGTGCAGCTCCTCACCCTCTGCCGAGTCTCAATATCTGTCTTCGGTGGACTCCTTCG
GCAGTCCACCCACCGCCGCGGCCTCCCAGGAGTGCGCCGGTCTCGGGGAAATGCCCGGTTCCTTCGTGCCCACGGTCACCGCGATCACAACCAGCCA
GGACCTCCAGTGGCTTGTGCAACCCACCCTCATCTCTTCCATGGCCCAGTCCCAGGGGCAGCCACTGGCCTCCCAGCCCCCGGTCGTCGACCCCTAC
GACATGCCGGGAACCAGCTACTCCACACCAGGCATGAGTGGCTACAGCAGTGGCGGAGCGAGTGGCAGTGGTGGGCCTTCCACCAGCGGAACTACCA
GTGGGCCTGGGCCTGCCCGCCCAGCCCGAGCCCGGCCTAGGAGACCCCGAGAGGAGACGCTCACCCCAGAGGAAGAGGAGAAGCGAAGGGTGCGCCG
GGAACGAAATAAACTAGCAGCAGCTAAATGCAGGAACCGGCGGAGGGAGCTGACCGACCGACTCCAGGCGGAGACAGATCAGTTGGAGGAAGAAAAA
GCAGAGCTGGAGTCGGAGATCGCCGAGCTCCAAAAGGAGAAGGAACGTCTGGAGTTTGTGCTGGTGGCCCACAAACCGGGCTGCAAGATCCCCTACG
AAGAGGGGCCCGGGCCGGGCCCGCTGGCGGAGGTGAGAGATTTGCCGGGCTCAGCACCGGCTAAGGAAGATGGCTTCAGCTGGCTGCTGCCGCCCCC
GCCACCACCGCCCCTGCCCTTCCAGACCAGCCAAGACGCACCCCCCAACCTGACGGCTTCTCTCTTTACACACAGTGAAGTTCAAGTCCTCGGCGAC
CCCTTCCCCGTTGTTAACCCTTCGTACACTTCTTCGTTTGTCCTCACCTGCCCGGAGGTCTCCGCGTTCGCCGGCGCCCAACGCACCAGCGGCAGTG
ACCAGCCTTCCGATCCCCTGAACTCGCCCTCCCTCCTCGCTCGGTGA

[0294] TABLE IV

MOUSE NOMENCLATURE
ICSGNM Cmkbr7
Celera mCG15362
HUMAN NOMENCLATURE
HGNC CCR7
Celera hCG1643840
MOUSE SEQUENCE - GENOMIC
NNNNNNNNNNNNNNNNNNNNNNNNNNNNNNNNNNNNNNNNNNGGGAGTTCCATTCTCAGCCCGCTGCTACTGCCTGTGAGCCTCCTTTGGGAAAGTC
CTTAATTTCTCTAGTTCTGTTATTTCCTCATCTCTAGAATGGGCATCACGACACTGATTTCACAGAGTTGTTCCGAGATGAAATGATGTGATGGAGT
AGGTACTAGTTCCCAGCCTCTCAGATCCTGGAAATGGGTGTCCTGCCTCTCCCTCTGGAAGCTCCCTGAAGGCCAGGCTTTGGGTCCTTCATCCAAG
CTTGGATGAGTATTTTAAAAGAGTCTCCGTGAGTTTTGCTCATTAGCCAAAACGGATGCTGGCCTTTGGAAGCGGGGCGGATGACTCTGCGTGGAAA
TATTCTTCTCTGAGTTTCCCTCCTCTGCCTACTTCCTCGTGAGTTCTATGTGGCATCTATTTGAGGTCAAATCTATTGAAATATACTTCAGCTTAAC
TCTAGGTGCCTTTTAGTTGAGCACCAAGAATATACTAAGTGCTATGTAAGAAATAGATAAAGGACCCAGTATGGAGGAGGAGAAATACCAAGCCAAG
CCTAGTACTCAAACCGCAGACAGTGATAGGGACAGCCGGATCGCTTTCTGTAGGCTTGAGGGTTTCTGAAATTCTTCAGGGAATTGGGAGCTCTTTG
AGCTGGACTTTTTTAAGCGTATGAGTGTTTGGTCTCTCTCTATGCATCTGTGTCATGAGCATACCTGGTACCTATGGAGAACAGGAGAGGGTATCAG
ACACCCTGGAACTACAGATAGTTGTCAGTTGCCATGTGGGTGCTGGGAAACCCACCCTAGGTCCTCTGCAGGAACAGCAAGTGCTGAAGGGACTACT
GAGCTGTCTCTCCAGCCCCTTACGTTAAATCTTGAAGAACGGGTTAAAAGATGACAGAGCGGGGGAGAGGTACCGGAGAGAAAAATGTGTGAAAGTA
GTCAGGGCCTTGACCTGGAAGAGTTAGAGAACAAGGCAGATGCAGTTGGCAGGTCCGGAGCAACAGCTCCTGAGTGTTCAATGGGCCAAGTTGAGAG
GGGCTTTGGATGCCATGAAAGGTTGCCGAGGAGAAGGAAGTAGAGAGTGAGTCCTTCAGCTACCACAGGGGAAGGGTGGGAAGGGGGTGAGGAGATT
TCCTAAATGTGCATCATTGGCCTTCTGAGGTCTTCAGAAGACGACCAGTGGGGTCCCCAAAGGGTGAGACCAGACAGAACAGACAGCCACTATTCCC
GCACCAGGACACTCAGGTGTCTACGTCAGTCGCTAGCTATGCACATGGGTACCCTGGGCATGGAAAGTACAGACTGGCTTTCTAACACATCATTTTG
CCGTGAGACCAATCCCAGCATTCCCTCTATTGTCCTCAACAGAATCAAACGTCCAAGCTAAGGGGCTTGCCACCTCTCCAAAATAAAGGTCACCTTA
GAGGTCAAGAAAGCATTGACACAAACCTTGGGTAAGCCCTAAGACTGTAACTTGGGAGTTGTCATGACAACAGGGCAGTAGAGCCATCTCTACTCTC
TCCTAAATGGCACGAGGTTTAGATGAGTAACTCTGAAAGAACAGACCCCACCCCTGTTTTCCTATTTACCATCTTCAGACCCCTCCTCACCTGTGCC
CCAGCCCTCTCCTCTAGGACCTTAGCAACTTGAACAACATAGACACACACGCCTCCTCTCAGTGTCCAACAATGAGCCCTCCCAGCAAAACAGGAAG
CCTCTTGCTGCCAAGGCATTGTGCTTGCCCTGTCACGTGTCAGGAAACCACTACCGTGCCATGGCAACAGGTGTTGCTGAGACCTTAGCCTTCCCGC
CAACCTGTGCCCTGCCCTTCTCTCTCCTCCTTACTCCTAGAGAGTGTCCTCGTTGTGCAGTGTCCTTGACTCACCTGGACACTGCTGTGAGTGAGCG
TCCTAATTACCTTAACTTGGATGAGAAGACTAATTCACCCTATAAGTCAGTGGCCCAGGGCCAGGGCTTGGGCCTTAGACTGCATAAAAAGGAGAAA
GCTTGCCGACTGCAGGTGTTCATCTCCCCTTGTTTCCTGCCTATCAGTGCAATGTCACCAGCCACTCCAAGCCAATGTCACCACCAGCCACCCCAAG
CTCCTGCTGCCATGATTCCCCAACCAGGATGGACTCTACGCTGGAACTGTGAGCTGTATTAACGCTTCTCCCCTAAATTTTTCTTGTCAAGGTGTTT
TCATCACAACAGCAGAAAAACCAAAACCAACTGACACTTCCTCCTTGCAACTGGCAGCTCACATCGCTTGCTCCTTTCCCATTTGGACACCAAAGAT
CTCACTGATCATCATCCAAACACAGTTCTTCATGCTAGCCAGGCAACATAAGAATGTACCTGTGTGGAAATTTAGCAAGCTTCTTAGCTCTTTTGGA
TCGCAAAAGTCTAGGTAAGGTCTGAGATGACTCTCTCTCAAATTCCAATATCCCTAAATGTATGCCAGACCTTCCTGTAAGGTTGCTGAGTCCTGAA
GCTAAACTGACTGTCTTAGTTAAGGTTAGTAGTGCTACCACACCAAAAACAAAACAAACAAACAAAAAAAAAATGAACAAGCCAGGCGTGGTGGTGC
ATGCCTTTAATTCCAGCACTCGGGAGGCAGAGGCAAGCAGATTTCTGAGTTCAAGACCAGCCTGGTCTACAAAGTGAGTTCCAGGACAGCCAGGGCT
ACACAGAGAAACCCTGTCTCAAAAAAACAAACAAACAAACAAATAACAGCAACAACAACAAAAACATGAACAAAAGCTATTTGGTTGGGGAAGGTTT
TATTGGCTCACACTTCCATATCATGGTCCATTATCAAAGGAAGTCAGGGCAGGCACTCAAGGCAAGGCAGGAACCTAGAGGCAGGAGCTGATGCTGA
GGCCATGGAAGAGTGTTGCTTACTGGCTTGCTGAGTCTGCTTTCTTTTATCATCCATTGTTACATGGAGATTAATCAAAGTTGCATGAAAAGAAGAG
AGAAGGACCTCCTCAGACGCAGATGGAAGCATGTGGTCCTTTGTTAGGACTCTGAAGGGCAGTGGTCTCTCAGAAAAAGGCTGTCAGCCAAGGCACA
GGGGGTTTGAGGGTTTTATAGGACAGAAAAGGAAGCGTTTGTGGTTGGAAAATTCCATCTGCAGATCTGTTTCCTCAAGTCTCAGCACTGTAAATAC
CAACGGAGGTTCTTATCCATTAGTGAATTTCTTGTCAGGAGAATCCCGGCTCCTAACTGCCTGCAGATGTTAGCAGTGTATCCCTGGTGCCATCCGG
AGTTTCTCAGCTCTCCTGGGGCTTTTAGGTCATTAACCCTTCACCCAAGACCAGCAGCAGCAGCACCGCCCAGTGAACTAGCCTCAGAGACTCACCC
TACAGGCCAATCTGATGGACGCATTTTTCTCAACTGTGGTTCCCTCTTCTCAAATGACTCTAGAGTGTGTTAAATTGACATAAAACTAGCCAGCACA
CTGATGATTCTGGAGTGAAATCAAAAGGAGCTTGAAGATGAGGGTGGGGACAGAGGCAAGGGTATGTCTTAGACTTTACTCATTGAATTGCAAGCCG
AGAAGGATTAGAAGACATCAGCAGTATCAGTGGACAAGTGGCATTTGAATGCCATATGGAAGAAGGACAATAAGAAGTTCCTGCAGACCTGGTTCCA
TCCAGAAGCCTCTGCTCTGACTCCTCTCCCGGGACTCTTTAGGTCAAGGACTTTCTCCAGGGGTCTCAAGACTTTCTGTGTTCCTTTATACTAAGTT
TTCTTTCATCCTGTGAACAATCAAGTCATCAGTGAGGTGGTTGGGTGACATGGCCCATAAAGATGACTTCCAGGGACCTGGTTCCTGCTCACACTCT
GAAACCTTTGCTCCTGGGCAAAACTTCCCCTAAAGAACAATGACACACATTCTCAGAGAACAGAGAACAATAAGCCGTGTGTAACAACATCTTCCAG
AGAGAGAGAAGCGTGGATTTAGTCCTTTTGGGCCACGCTCAGCATCAGCAGGAGCTAGCTTGACATAAGGAGAAAAGCCCCTTAGCTTGGAGCTAAA
GGTCACATCACTTTTAAGTCTCAGTTTCTACAGCCACAGAACAGAAAGTTACCAAACACAGCAGCCTGAGGGTTTCATGTGAGAAGGTCATGGAGTC
CCAATCACTCACTCCTTAAACTTGACTCTGTCTGCAGCCCCCAGCTGGCCTTGAACTTGTGGCAGTGGAGAATGTGCTTGAAATACAGAAGCCAAAT
AGAAACCTGGAAATGTTACTTGTCACTGGTTGGAAGCCCTGGACCATGGTGGATGGACACTCGATTCTGAGTACCTACCCCCAGGACTCCCCAGAGT
AGATGTTTATAGTTGCTGGATGATGGTGGATGGACAGACAGACACGGACTGGCGCCTAAGAAAAGTCTAGCATGTCATCACGTACTCCAGCAGCCCG
AGAGCTTCATGTCAAAGACACAAAGCAAAGCCATCTCATGTGCCAACCACAACCTAGCCAATGGGCAGTTATCAAAGCCAGAAATCTGGCCTAGAGG
CTGACCATAGCGTTTCTTTTCACCACTGCCTTCCTCCCTCACCTGGCCCACTCCCTCAGCTCTCTAGGTGCCACTCTTCCCATAGGAGTCTTGGTTG
GACTCCTACTGTGCCTAAGCTATGCCAGGCTGTTCCCTAGCTAAGTCCTGCAGTGTTGTGATGCAATATTGTCCTCCATTATTTCCTAAATACCATG
AAATATTTAATATATAAAGCCATAAAAAGCCGGGCATGGTGGCTCACACCTTTAATCCCAGCACTTGGGAGGCAGAGGCAGGCAAATTTCTGAGTTC
AAGGCCAGCCTGGTCTACAGAGTGAGTTCCAGGACAGCCAGGGCTACACAGAGAAACCCTGTCTCGAAAAAACAACAACAACAATAACAACAACAAA
AAGCCGTAAAAAATAATGCAATGAAGACTTTAGTTCATCATAAATAAAACATCACCTTCCGAGCCCTTCCCAAAATTAAGGTGAGCCTGTTTGTGGG
TGCCATTTCTCTTCATATTGTTTGAGAGTGATTGTGTCTTGTCATTTGTCTCACTTTGTGTTCCTTGGTTTTTTGGCCACAGAGTCTCACTCTGTAA
AGGTGGCAGATCCAAGTGTGGCAATCTTCCTACCTCAGCTGCTGCTGCTGCTGCTGCTGCTGCTGCTGCTGCTGCTTCTTCTTCTTCTTCTTCTTCT
TCTTCTTCTTCTTCTTCTTCTTCTTCTTCTTCTTCTTCTTCTTCTTCTTCTTCTTCTTTTTCTTCTTCTTCTTCTTCATACGGTATTCTGCCTCCAT
GTATACCTGCAGGCCAGAAAAGGACACCAGATCTCATTAGAGATGGTTATGAGCCACCATGTGGTTGCTGGGAATTGAACTCAGGACCTCTTCAAGA
GCAGCCAGTGCTTTGAATGTCTGTGCTGTCTCTTCAGCCTTCCTCCTCCTCCTCCTCTTCCTCCTCTTAATAATTTACTTTTATTTTATGTACATTG
GTGTTCTGACTGTATATATGAGGGTGCCAGCTCCCTTGGATCAGGAGTCATAGACAGTTGTGAGCTGCCATGTGGGTGCTGGGAACTGAACCCAGGT
CCTTTGGAAAAACAGCCAGTGCGCTTAACTGCAGAGCCATCTGTCCAGCCCCTGCCTCAGCTTCTTAGTGCTAAGATTACAGGACTTCATCAGAACC
CTCTGTTGATAAGACAAGATCCATCTTTGTCTATCTTCTTCACTGTGGTGGACTGGATACTCCCTACCACCATCACCCACAAAGATCATATGCTAAA
GTTATGACCCTACGATGGCTGGATTTGAGAATAAAGCTGTTGGGGGTTGGTTTTAATGCTTTGAATTAATCCAGCCCCCAAAATCGGGAAACTGCAT
GTCCAAACACTAAAGATCCTTGTCCCCAATTGGTTTTTGATCAATCAAAAAAGAGCCAATGGCCAATGGTTGGGCAGGTAGACTGAAACAAGACCTT
TAGATTTGCTCAGGCTGGGAACTGGGAGAGAGGAAGGAGAGAGCATTGTCGTGGTTTGGAGGGAAACAGATCAGAATTAGAGACGCAAAAGGAAAAG
CATCCGAAATGTAGGAGAGAAAGAATTCGGGCCCTGGAGGAACAGCTCAGAAGTGTCTTGGGCAGCAAAGACTGGGGTAGGGGCACCCAGAAGGAGC
CAGGGCAACAAAGATAAAATATAGAATTAGAGGGCATTAAGCCAGGAGTACCAAAGGGAAATGTGTTCTAGCCACAGGGAAGATTAGAACTGCCCAG
CCTTTGAGCTAGTCAAAGCATATTTAAAATTAACTGGTGTGTGTGTGTGTGTGTGTGTGTGTGTGTGTGTGTGTGTGCTTCATTCTTGAATCCAGAT
AGCTCTTGGGCAGGTGCATGGGTGTGACGAATCGGGAGCACAAAATGATTTAGCTAACTACTGCTACGTAGAGAATCTAAGGAAGTTATTTAAATTA
AATAGCACTATAGAGTAGGGTCCTGGTTCCATGGAATTGGTATGTGAGTGACATTACCAGAAATTGACCCTACTGGCCTTTGCCTTGGGACTTCCAG
CCTCTAGAACCATGAGGAAACATATTTCTGTTGTGTAAGACATCCAGTCCATGGTATTTTAAGAGTCCAAACAGACTACTCACTCCATGTAAGTTAA
GCAAGGCCAAGGATCATGTGTGCTTGTCTTTGGATCAATACTGTCCATCACTATACCTAACACATAAGTGCATGCCAAATATCTGTTTGTTGAATGA
ATGAATGAATGAATGAATGAATGAATGAATGAATTAGATAATTACTAAAACAAAACATATAGGGTTCTGGGGTATGCAAGATGGTTTAATGGGTAAA
GGTGCTTGCTGACAAGCCTGACAACCTGAGTTTGATCCCAGGAGTAGACCTGGTGGGAAGAGGAGACTTACTCCTGCAAGATGTCCTCTGACCTCAA
CAAGCATGCTGTGCCACATGCCTGCACACAGCTCTTTCTCCCTCTCCCTTCCCCCACCCCCATTCTCTCCTTCCTTCCCTCATGCCTCAACATGAAA
GCTCTCGGCTACTGCTCCCATACCTTGTTTGCCTGCCTGCCTCCTGCCATGCCATCATCCACCATGATGGATGTGAACTCATCCTCTGAAACTGTAA
GCAAGCCTACAATTAAATGCTTTCTTATATAAGTTACCTTGGTCTTGCCATCTGTTCACAGGAATAAAAAACTAAATACAACAAATTATACATGCCC
CCCCCAAAAACCCTTGTAAATGAATATTTATAGCAACAATACTCATGATAACTAAATAGTAGAAACAATCCAAATAGCCAACTAATAGTAGATAAAA
CAAATGTGGTATATCCACACAATGGAATATTATTCAGCCACAGAAAGGAGTGGAGAGTTGAAACATACTCCATATAGATGAACCTAATTAAAAGAAG
ATAGATATGAAGGTAACATTGTGTCTATTTATGTGCATTAATCAACAGAAGCAAATCTACAGAAAGAAAGTAGGTCTGCGGCTCAGAGCAGTTATGT
GCACAGGTGGAAAGGACATGGGAATCATCGGAAATAATGGCTGAGGAGATCTGACTAAAAATGATTCAAAGTTTACCGTGGCGAATAAACGCCGTGA
CTATATAAACACCACAGAAATGTCTACTTTAAAAGAGGAAATGTGGGGACGGGAGAGATGGCGCAACAGTTAAGGACACTTGATGCTCTTGCTGAGG
ATCCAGGCTCAGCACCCAGCACCCACACATCAGCTCACAAGGCCTGTAACTCCAGTTCCAGAGGATCTGACGCCGTCTTCTGACCTCCACGGGCTGT
AGGCACACAGGTGGTACACAGAAAGGCACTCAGGCAAATGCTCATACACATAAAATAAAAATCAATGAATCGTTTTCAAAGGTGAATTTAGATATGA
ACTATAGCTAACTAGAGCTGTTGTCTTTTAAAAGAAAGGAAGGAAACACAGATGAATTCCTTTCTTTCAACCTTCCATTACCTGTCAGTATAACCTC
ATGGCCAATTCTCTCCAGAAGCTAGAGGGAAAGTCGTCCGGGAAATGTAGTCCCTGTATGCAGAGCAGAGCAAGGGTATCAAGTGAGTGCCTAAAGG
GTTATGTTGTCATGGCAACTGTTTTAACTATTTATTTATCTTATGTATATGAGTACACTGTCACTCTCTTCAGACACACCAGAAGAGGGCATCGGGT
CCCATTACAGATGGTTGTGAGCCAACGCGTGGTTGCTGGGGATTGAACTCAGGACCTCTGGAGGAGCAGTCAGTGCTCTTACCCACTGAGCCATCTC
TCCAGCCCCCTGTTTTTAACTAGTTAATACAGAAGAAGGGCTAAGTCATTCTGAGCTCTGTGTCGGGTCCTGTCGCTCACTGAATTGTCTACAATCA
GTGGCTAGAGATAAAAAAATTTACAGGTGTCTCTCCTGGAAATGGAACATTTAGATATTTGCTCTAGAACTCAATGGCCACCCACAGTCCCCACATG
ATCTCTATGCTTGTTTTAAACCCACTCCTTGGACTGGGGAGGTGGCTTAGTAGCTAACAGAGAATTGCCCCACAAACACGAGGAACTGAGTCCAAAT
CCCAGAACCCTCATAAGCAGCTTGGCAGTAGCATGAGCATTCGTCATCCTAGCAGTCCCCCAAGGAGATGGGAAGCAGAGACAAGAGACCACGCACC
CAGAAGGCCAGCTCACCTTAGTATAGAATGGGGCACTCAATAAAGACGTGATACCTGCAACAGAATGGAAGTAGGCTGACACCTGACATTGTCTCTG
ATCTTCACACGTGCAATGGCATAAAATCCCCACATTCACGCATACGATCGCACACATACACGTGTGTACACACACCATACACACCACACAGGCACAA
CAATTAAAAATGCCAATAAATATATCAATCAGTTTCCCTGTGGGGGAAAATGGGTGTGGTCACAAAGAATAAAAAAAGTAAAATAAAAATAGGCCAG
GCATGGTGGCATATGTCTTTAATACCAGCACTCGGGAGGCAGATGCAGGTAGATCTCCATGGGTTCGAGGCTAGCTAGGTCCACAGAACAAGTTCTA
GGACAATCATGGCACTGACAAAAATAAAATAAAATAAAATAAAATAAAATAAAATAAATAAATAAATAAATAAATAAATAAATAAAATCTCTTCTTG
GGGAACCAGTTTGGATAATGACTTAGACTTGATGTCCTCCTCGGTTAGTAGAGAAAGCCGAGGGGCTCCAGGCACCCTCATATCTAGCATCTAGGTC
CTGTGATGTTTAGCTTAAGTACTAAAAATAAACACTCAAACTTTCACTTCGTGGTTGTGTCACTGAAGCCTTGCTGGCCGGACCGTTCAACAGACCT
CACCCTGGCTGCGCAGGTGTATGTCGGGGCTGCCTGGCGGCTGCTGGGACAATAGCCACTGATCAAGTTCATACTGAAAGGGAGACTTTTATTCAAA
ACCAAGAGAAGGATGCAAGTACACCTCTGACTCCCGAGCCTCAGCCTATCTCACCCCACAGCAGCCACCCAGGCGTGCTTGGCACTCACAGATGTAA
GCAGCTCCTCCCTGAGTCTCTACAAGGCACTACTACCAGGGGCTTTCTGAAGGCAAACGACTCAGTGATTCAGGATCCTATGACAGCCGAATGTGGT
TATCACATACCTTGTGGCCCAGGAAGACTCTGAGGGGTGGGACAGGAGTGGGAGGGGCTCTGGAACAACTTAAAAGGGGCTCTTACCACTTCCTCCC
TGCCAGAGAGGGCTAGCTGGAGAGAGACAAGAACCAAAAGCACAGCCTTCCTGTGTGATTTCTACAGCCCCCAGAGCACCATGGACCCAGGTAAGTA
AGCTTTCTCTTAAGAGAAGTCAAAACTTCTGACACAAAGCCAGACTCTAGGGCAATGAACATGCATGGGGGATAGGGGTCATGGGGGGGGGGGGGAG
TTTCCCAGAGCAATCAGGGCAGTTGGTGTGAACTGGTGGCTGCTTTCAGAGAATGCCATCCCGTTGGATGAGGCATTGGAGAGAGGATGTACCTGCT
CTTTCAGACCCAGGGGAAGGAACAGCTGTGGATGCCAAGACAGACACAGGCATAAAGTTGGGTCCTCTCAAGCAGCAGGCAATGAACAGCCTGGTAG
TTCAGGACACCCTGCTCCCACTCTGGGTCCCTCCTTTCTGTCCTGTTAAACCAGGATTTGAATCTCCTTGCTCACGAGAAGAGTGAAACTGATGGAA
ACTGTGCTGTGCATAGTGCAATACAAATACTAGCTGCCACCTCTGCCTCTTGTTGTCTCTGCCTGTCATCTGTCTGTCTGTCTCTGTCTGTCTTCCT
CCCTCCCTTCCTCCCTCCTACACATCCCAGGTTTTGTGCCTCTTGCAGGTTAAAGGGTGAATGACTAACATAAAATTGAGTGGCCCAGGGGGCACTC
CACGTAGAGAAACTGTAGCCAGCACAGCACAGCCCCTAAAACAAAGCCCACACACCACAGCCCTCTCTATAACAAGCTATTCTACCAGGCAAGCCTC
AGTGTCTACTATAGCAAAGTGCCAAGGGGAGTCCAGCTCCAGACACCCCAGTTACACATCTTAAATCTCGGCTGCAGAGTCAGACTCGGCTGGGGCT
GGAGGGGCCAAGTTCCTAGAGTTCCGCTCACCAGCCTCAAAGCCACAAGGGGTTGACTTTAAAAAGTGAAGGTTCCCTGGTGCTGTCCTCACACCCC
CTCCAAGCCACACCACAGCCAGCAGCATCTTTATCTGTCTCTCCTGCCCAGCGTGCATTGCACCCTAGATCTAGATCCAGCTGTGGAAGGTATATAG
TGGGGTCCACCTCTGCTGGCTATGAACTCATGGGAAGCAGGATTTTGTTCTTACACCTCTGCCTCTCAGATGTTTTGGGTGTAAGTAAAAAGTGTTG
ATGGGAGGGAGGGAGAGAGGGATGGAGGAATGGATGGATGGATGGATGGATGGATGGATGGATGGATGGATGGATGTGTGGATGGATGGATGGATAG
AATCAGCCTCTCTAAGTATATTTTAGAAAGCAAATATCTATTCCAGCTTCTCCTCCCACCTGCCTGCTTTCTAAGCCTACACCTCAGGTATCTACCT
CCACCAGCCATAGTCTCAGAGAACCCACACCATCCACCAAAGATCTTCTCCACCTTCCTAAAATGTGGCTCCCAGAATAGGGAAAGGTTCTAAATTT
ACAGCATTTGCCAATTTCCATGGTGTAAATTTTACCATCCCAATTGACCTTAGTCGGTCCCATTAAAGGTCTAAATGTTTTGACACAAAAAGGAGAC
AGACACCTGCCTTCCTTGGCACTTGGGACACTATAGAGTCTCTCCTGAACTAGGTTTGGGGATGCTAAATGCATGGCTTTGATACAGGGGGTGGGGC
AAACTCTGGTCCTGGAAGAAGAGATAGTCTTGCTTTTTTACTCAACTTAAGAAGCACCCTAATAGCTAACTCTGAAATGCTGGTGTGAGGGGAAACT
GCTTAAGAAGTTTTGCTCAAAACAGGCTCCGGCGCCGTTGGAAGGGCGGGTGGGCCACAAACTATCTGTTTTTCACTCTTTGTCTACCTAGTAGGGA
CAGGAGGTGGGTGAGAAGGCCTAGGTTTCTGTTATACAAAATGAGAAACTACAAACCAGGGCTGAGCTGGCCTCTTTCATGATTTGAATGAGCAGCC
CTGATATACCCTTCCTAACTTCAAGACATGGGACCACAGATCTCAGCACAACATCTCAAAATCAGAGAAGGGGAGGGGGTGACAAATGAACCCATAA
GAGACTTGTGTCTCACAGCTCAGCTGTAGATGGCAGTAGAAGAGAATTCAGGGTCATTCTCTTGTGGCCCTCCAGAAACCTGGCTGTGGAGAACACT
GGAGCCCAGAGTAGCTAGGAAAAAACGCTCCTCTGTGTGGTATTGTCTTCCAGTCATGTGTCACTCATTGAGAACTTCTTGAATACAGAGTCTGGTG
GGGAACGTAACATGTATGTCAACACGCAACACCAACAGTGAGAGACACAGCACTCCTGAGGGGGCATAAGGACAAGATTCAAAAGCAAAAAGCAAGG
CTGTGAACACGTGTCCAGAAAGCATGGCAATTGTATTTTGAAGGGTGTGTAGAAGTTGTCAAACCTAATAAAGAAGGGCCAGGTTGTAGCCAGATCT
TCAGACTCTACAGCCTTAAGCCAACAAAGTAAATGAGGCATCCGAGTGTCAGGAACGTGACTGGCACACAAGCCTGAGGAACCTGAGCTTGTAGCCT
CAGAGTTTAAAAGCTGGCTGTAGCAAGGTACACACGTAATACCTAAGCCTGCTTAGGGAGGCAGGAATAATAAGACTTGCTGGCCAACCAGTCTTCA
GAATTGGCAAACTCCAGGTTCCATGAGAGACACTGATGTCAGCCTCTGACCTCTGTATGTGTGCACACCCATACATATATGAGCACACACCTTGAGC
TCATAGTCAGTCAGCTCTGGTGAAGGCAATAGAGCAACAAGGAAGGGGGAATGGTGTCAGCTGATGGGAGTCAGGGAAATAGATGTGCCAAGAAACA
AGCTAGACTGGGGTGGCCCTTACAGCGCTGTGTGACAGCACCAGGGAATCCATACACCACCCTAAAAAGAATGGGGGCCAGCAAAGGTCCCCCACCC
TTTTCCAAATAGATGGGCAGATAGATGAAATGTGTGTTTTGGAAGGAGTAGGGGACAACAGATCCTTGTATCAGGACAGGGGAGGGACCAACATCAA
AAGATGTGGAAGATCGAGATGTGGAAGCAACAGACACGAGTGGCCAGAAGCAGTAGAGAGAGCAAGAGTGGCCTTGATCTGTGGAGGACCCTCCACA
CCCAAGGCTCATCAGTAATGTCACATGACTCAGCCATTAGAACCCAGGCTAGATGTTCCCCTTTCCCATCTCTGATCTATTGTTTAATAGCTATGTG
AATCCAGAGGAACGACATAACATCTCTGGGCCTGTTTCCTAGAATACAAAAGGAACTTACAAGATGTTATGAGGGGGGAGAGATGTAGGGAGAGGAG
CTAGGAGTGAGGTGGCCATGGCCAGGGGCTGGGTGTCCTTAGGGAAGCCTTGTGCTGACAGTTCTTCCGTTGGGGCTGATTGTCACGTGGGGTCTCA
CAGGGTATCCATTGAGGACGGGGATGGCAGCGCCTGTCTCACGTGGACAGCGCACTTCACTGAAAGCTCAGTGGGTGCCAATTGCATCACTGAGTGA
CAGCGTTGGTGCCCTAATAACAAGATCCCACCAGCTCTCACATCCCTGCCTCCCATCTGCGGGCTGGGTCCCTGCTTCAGCCTCTGCCCTTTCTCAT
GTCCCCTACAAGCGGCTGAGAAGGTCCAGAGAGAAAATCATCACCTGAGGTGTCTCTCGGGCCAGATGATAAGCAGCCATGGTTTCCTGGGCAGCCT
GGAGGGACTGGGGGAATGTACAGATGGGAGCTTTAGGACCTGAGCAGGAGGCGACTGGCTTCCCAGGCTGGGAGCTGGGGGCGGGGGAGGGAATTGA
GTGTCAGGCTGAGGCAGGGCAGGGCAGGGGAGTTGGGATGGTGTCGGGCTAGAGTGCTAGGGAGTTTTCCTTTCACCTTAATCATTCTGCAAACCCA
AGAACTCAGGAAACACCGAACACCTCAATCAACAGCTCCCCCACACTGGCATTCCCAACTGCCCGTAGCTCAAGAGCAGTTGCTTTCTGACTATTGA
GTCATCTGACTCACCAACACTGACCAGGTCCCTCTGTCACCACACGTTCAAATTCCCCCAAATTCTCCTGTTAACTGCCTTGAACATGGCCTGTCCT
GGATCTACAGGACCCCGACTCACCCACCCAACCCCCACCCCCAACCTCATATCCAGTATCCCTGGAATGAGACATCAATTTTGTTCACACACCCCAG
AGCCCCTCCGGGTTTGTGGCTACAAAAGAACCGGGACAGAACCCAGAGTAAAACAGAAACAGTTCTTGTTCCTTAGGGGTTTCTCCACGTCCCTGAC
AGTCAGATTGGGCTTTCTCTACAGTAACCGAAAGCCGTTGATGGGTTGAAAGAAACCTCGAACGCTGAACCCCGAAATGAGTCAGGGAAGGGCGGGC
TGTGCATCAGACCCTGAAAATCCTATAGTTGAGAATGGGCATGTGACCTCAAGCTCGTGGGGTGGGGGTGGGGTGCCAGGGGTAATTCAGTTGGGGG
GGGGAATGTGTGAGAGAGATGAGCTGTGAAGCCACGTGGTGATGTTCCCCTTCCTGTCTCCAAACGTTCTAGTACAAGCTGATGATAAGGGGACAGT
GGCTGTCTGTCCCCAGAAAAAGATGGAGCTGGTGAGGCATGGGCCCCACGCTAAGCCTAAGCGTCTCTCTATCTCTACAGCTAGGATTTCGACTTAT
GGTTAGGGATTTAGGAGGGAGGCAAGATAGGAATAGAGGGCAGAGTTAGCTTCAGTAAGACGTGCTTACATAGCATGGAGGAGAATGTAGAGGGGAA
AAACGTTTGTCCGGGTCACCCTGATGCCCTTCCTGCCTGTACTGAGTGACCAAGCGTAGCCTCCTCAGCCTGGAGTACATGTCAGGTACCCTGGGTG
TCATGTAGCCTAGTCTCCAGCAGGTGGTGCTATGGCCAAGGACAAACAACATCTGCGTTTGAACTGTTTCCCTGGCCTCAAGAGGTCCCCCAGACTC
AGATTGGGGAGCAAAGTCCTACTCTGGACTGCAAGACCCATAGGGTCTGACTCTTCCTGTAGATCTGAAGAACTGGGATTCAAGGGCTGGAGAGGGG
TGCCAATAGCAAAGAAGGCGGATCAAGGGTCCCCAGGGGTGAGACGGGAGTATGTGGGGTAGAGGTCTGGGGTGGGGGGCATAAGATGTCTGCAAAA
ATTACTTTTCCAGTTGTCCTCTTGCTTAGCTGTCAGGAGAAAATACAGCCCAGGCTGGCTCAAGGCTCAGCTCTGAGCAGAATGAGGAGTGGTCGCT
GTCATATNNNNNNNNNNNNNNNNNNNNNNNNNNNNNNNNNNNNNNNNNNNNNNNNNNNNNNNNNNNNNNNNNNNNNNNNNNNNNNNNNNNNNNNNNN
NNNNNNNNNNNNNNNNNNNNNNNNNNNNNNNNNNNNNNNNNNNNNNNNNNNNNNNNNNNNNNNNNNNNNNNNNNNNNNNNNNNNNNNNNNNNNNNNN
NNNNNNNNNNNNNNNNNNNNNNNNNNNNNNNNNNNNNNNNNNNNNNNNNNNNNNNNNNNNNNNNNNNNNNNNNNNNNNNNNNNNNNNNNNNNNNNNN
NNNNNNNNNNNNNNNNNNNNNNNNNNNNNNNNNNNNNNNNNNNNNNNNNNNNNNNNNNNNNNNNNNNNNNNNNNNNNNNNNNNNNNNNNNNNNNNNN
NNNNNNNNNNNNNNNNNNNNNNNNNNNNNNNNNNNNNNNCTGGGCAGCAGGCCAGGTGTTCAAACACACAATCTGGTTCTGATGTTCTCTTTCAGCA
AGCCCGAGGTGCCTGGAGCCTGGGATAAAAGTTCCCAATGGTGCCCCTGCCCCACCCCCGAATGTCTCCTTAATCACCGAGCAATTTTTACCGGGGC
GGTAACATCATCTCCTTTGTCTCCTCTAGGGAAACCCAGGAAAAACGTGCTGGTGGTGGCTCTCCTTGTCATTTTCCAGGTGAGGCTTCCTGCCAGG
GCAAGAGCTCTCTTCCCTCCTCCACACCCCCTCCCCAGCCAGGAGTGCTGGAACACAAACAGACCGCTGCAAGGAACGAAAGGTCTAGACACAAACC
CACCTGCCGTTCACGGCCCCTTGCCCCCCCCCCGCCTCCCCCCCACGAAGGGGGCAGGCATTCTCTGGACTTCCATTGTCCCCCTTTAAAATAAAGC
CCAGGGAGACGTAACCTACCCCCACCCTCGTTCTTCCCAGCTCCCACCTCCTCACTCAGGAGACAGAAACAGTGTCTGAGATCTCTTAGACTTGTGC
AACACAGGGCTTAGAGTGGGCCTGGTTTTGCACATAGGTGCACACATCATCTGTGAACTGAGAAAAGGACCCTCGGTCGGGCGCTCTGGTTACTCCC
CAGTCACCCAGAGTTGCTTCCTCTTGCCTTTCAGTCCAAGGGTCTCCTTGTAATCTCATTCTGTTTTCCTTCATAAAATAGAAAGACCTTGGCTTGG
CTTGCCTGTGGGGAGCAGGAGGGAGAATGAGTGGAGCCCGGGACCCGGGTGGAGAGGACGGTGAAGGGAACACATAGTGGGTCTGAATTCTGCAGAG
CCAAGAGCCCACTCCGTTCTCTATCCCAGCAATGGAGGCAGAACGTGTGTCTCCCCAACCACCAGAGTCAGGAGAAACTCTGAGAGTCAAGTTTCCT
CAATTGGGGTAGGACTCTCTCAAGGTGGGGAATGGCCACGGCCAGCCTGGAGAAGCAATGCTTCAGGATTTGACTTTCTCCCAGGTCCGGAGGCCAG
AGGGGGAGCTTTCCAGGAGCTCAGGCCAGGCACAGGCCCCAGGCTGGGCACTGTTCCCCAAACCCCTCTCAGAGGCCCCCTGGAGCTTGGGTTGCAG
CCCCTTAGCCTGGCCCTTTCCCCATCACCACTCCCGCCCCTCCTGTACTGCTGGCTGGAAGGCCAGAGAAGGGTAAAGACATCTGTGGCTGGTTTTT
GTCTTTCACTTGGGAGGAAGGGGGGGGGGGGGTTCAGACAAGGCCGGATGTGGTGGGGCTGTGGGCTGCAGAGGCGGCAAGCTTGGGGGAAGGGGTG
TTGAACAGGAGGGAGAAGAGAAGACTGGGAGGGAGGTGGTGTGGGAGCACACTTCATAGAAGCTGGGAGTTCTGACCTCCAAAGGGTCTAGAAGCCC
TTTAAGCCTCTGGGGCCGCAGACCTAAGGCCACAGACCCATTCGTGAAGAGCCAAGCGCAGCTAACCTCTCCCAGGGCCCCCAGGCTGCAGTCAAAC
CTGGACCAGGGAAACAAGGTTGCTATGGACTCTTCTTCTCAAGTTAGCCATGCCCCAAGAAAGGGCTCCTGAACACCACTTTGTCCTTATCCTGTCG
GTAGGCTCACAATGGTGGTGCGATCTGTGGATCACCACTGAATGACTGAAAATCTCCTACCCAGAGGAGGAACCCTAAACTTTCCAAAGTGGGCCTT
CAAACCACCCCACCCCCCTCCCATCTGTGGTGGTCCATCCATCACACACAGGCAGACGGCAGGCACCCCCTCCATTGATAAAAATCACAGCAGCTGC
TGAACCGTCCCCCACACGCACCCTGCAGCCCTGCTAAAGGGCTAAAAAAAGCCCAGAACAGCTGAGCCCTGCTGATTGGGATCTGCCGGAAGAGAGG
CAAAGAGGTGTGGGAAGAGGGTGGGAACACAGAGGGAGAGTGGGGGAAGAGAGCCGCTTCCTTCCAGGGGCACAAGCCGCCATAGGAAGGCAGTCAC
ATTTACCCAAGCACTACCCCACAGGCCCTACGGTACATTTGTCTACGCGCTGAGTGTAGTGGGTACCAGGGAGCTGTGAAAATCCCCATGTCTCTTA
TCAGCAGTCCCTCGACTGAAGTTTATTCCTACAAAGGAGCTTTGATCTTCTCTTCCTGCTTCGGACCTTCCTCAACCTTGAACCTAACATAGGGGGT
TGTTTTTTTGTTTTTTCCCTCGAAAGCTGAGGCATTTTGTAGCCCCCACCCCAAAAAGAAAACTCTCCTGGGACCCAAAAGAGGCTCCAGAAGAAAG
ACACACTTTCCCCCCACATCACAGGGTCCCAAACCCCACAACGGTCCAGCACAGGAGTTGCGATTTGCCTCTATCTCCCAGACACAGAGAAGATGTG
CGATTTCCAGCTCAGGGCTCAGCAGACCCCAAAGCCCTAGACTATCCCCAATCTCAGCCAGTGAGGATGAGACTGGATGTCCCAGGAGTTGACAAAA
CATCAGGCCTTTGCTACTGATGAGTAGAAATGTAAACTTTCTGGTCCTGCCTGAGTCTGCAGGGCCAGACGTTTACATCTTAACTAGATCCTCCCTG
AGTAATTCATACATGTGCTAACATCGTTACTTAGATTTATTTTTTGTTTTGGTTTGGTTTTTTGGCTTTTTAAGATTTTTTTATTCATTGAACGTAA
ATGCATACACTGTAGCTATCTTTAGACACATGAGAAGAAGGTATCAGATCCCATTACAGATGGTTGTGAGCCACCGTGGTGGTTGCTGGGAATTGAA
CCCAGGACTTTTGGAAGAGCAGTCCGTATTCTTAACCCTATTTAGGATTATTTTATTTTATGGGTATAAACATTTTGCCTGCGTGCATAGAAGTACA
CCACATGCACAGAGGAGGTCAGAGTTGGGCATCAGAGCCCATGGAACTAGAGTTACAGAGAGCCACGACGCACCGTGTGGGTGCTGGGAACCGAACC
GGCCTTCTCTACCAGAGCTACACGCACTCTGCTCTTAACCCCTGAGCCAGTTCTTCAGCCCCACATGCTGAGGCTTAAGAGGTGTGGATTTCTAGTC
AAAGACTCACTTGGGGTTTGAGGGGGAAACTATAGTTTCCTGGGCTCCTCCGTCTAAGATGCTGACCCAAAGGGTCTAAGGTCTGAGAGTCTGCAAG
AGAACAGAAGCCCCGGGCAATGTCCTGACTGTGAGATCCGGACTGTGAGCTCATCAGGTGCTTCCTTCCCCCTTAGGTGTGCTTCTGCCAAGATGAG
GTCACCGATGACTACATCGGCGAGAATACCACGGTGGACTACACCCTGTACGAGTCGGTGTGCTTCAAGAAGGATGTGCGGAACTTTAAGGCCTGGT
TCCTGCCTCTCATGTATTCTGTCATCTGCTTCGTGGGCCTGCTCGGCAACGGGCTGGTGATACTGACGTACATCTATTTCAAGAGGCTCAAGACCAT
GACGGATACCTACCTGCTCAACCTGGCCGTGGCAGACATCCTTTTCCTCCTGATTCTTCCCTTCTGGGCCTACAGCGAAGCCAAGTCCTGGATCTTT
GGCGTCTACCTGTGTAAGGGCATCTTTGGCATCTATAAGTTAAGCTTCTTCAGCGGGATGCTGCTGCTCCTATGCATCAGCATTGACCGCTACGTAG
CCATCGTCCAGGCCGTGTCGGCTCATCGCCACCGCGCCCGCGTGCTTCTCATCAGCAAGCTGTCCTGTGTGGGCATCTGGATGCTGGCCCTCTTCCT
CTCCATCCCGGAGCTGCTCTACAGCGGCCTCCAGAAGAACAGCGGCGAGGACACGCTGAGATGCTCACTGGTCAGTGCCCAAGTGGAGGCCTTGATC
ACCATCCAAGTGGCCCAGATGGTTTTTGGGTTCCTAGTGCCTATGCTGGCTATGAGTTTCTGCTACCTCATTATCATCCGTACCTTGCTCCAGGCAC
GCAACTTTGAGCGGAACAAGGCCATCAAGGTGATCATTGCCGTGGTGGTAGTCTTCATAGTCTTCCAGCTGCCCTACAATGGGGGTGGTCCTGGCTC
AGACGGTGGCCAACTTCAACATCACCAATAGCAGCTGCGAAACCAGCAAGCAGCTCAACATTGCCTATGACGTCACCTACAGCCTGGCCTCCGTCCG
CTGCTGCGTCAACCCTTTCTTGTATGCCTTCATCGGCGTCAAGTTCCGCAGCGACCTCTTCAAGCTCTTCAAGGACTTGGGGCTGTCTCAGCCAGGA
ACGGCTCCGGCACTGGTCTTCCTGCCGGCATGTACGGAACGCGTCGGTGAGCATGGAGGCGGAGACCACCACAACCTTCTCCCCGTAGGGGGCTCCC
CTGCCCGGACTACAAGGACCTCTCCCAGGAGCCTTAATGTGGTGCACACATGCACAGACTCTCCATCCACCGAATTGCTGCTGAGGGAAGACCAATT
CTGGCCAGTCAGGTTGACATGAGGACCTAAGAAACTGCTTAACCCCATCCCACTTATAACTACCTCAACCAAAGCTGTAAAAGATATGGCTGAGAAG
TTAACACTCAAGCCAAGACAGCTATCCCCAAAACGACAGCCAAAAGTGAAAGTGAGAGGCTGCCACACTTTCCGGAGTGAGGGATGTGGGGCCAGTG
AACACCCTGGTTGAGTAGTCTTCGGAGGCCTCTGAATGAACCTGCTTCTAGCTTAGAGAGATGTCCCGGAGATTCAAGGACAGAGCTTATCTCCACA
CTTAGCAAGCAAGCAAGAGATGACAGTCTCTCTAAATGCTCCCACAGAGCACCCCTGCCCCTCCCTTCTGCCTCTCCACCGCCTTTCCTGAGGTCCA
GGCCACACCATCAGCCTGAAGGCAGTCCCAGCTGGGGCTCTGGATGGCAATGACAAGTAGTTGGGTCTCTATGATGGGAATAAAAAGGTAGGGGAAA
GGTGACAGAAAGGAGAGAAGGTGACCCTGCTGGCTGACAGAGGCCAGCAAGCTACTTCTTTGTTCTCTGTCAGCCACTGATACCTTTCCTCATGTTC
TGCTTTTGATTCATATATCTTTTATGAAGAAACAAATAAAAAAAAATTTTCCCTCGAGGAAACAACTTGGAAAGAAGGGAGGAAATTCCTTGGTTAA
ATGGCGAGTGAGTGAGTTGTCCCCCCATTCCACCTGAGAGTCCTGCGCCCCACACCCCTCCGCCCCAGCCTTCCTTTCTCAGCACTCAGAACCATGA
GGTCACAGAGCCTCTCCGGAGATGCAAACCCAGGAGGCTGCAAGAGGTGGAAAAAGAGCGAAGACAGGATGTCTGTCTTGCACATACACCTGCAGAG
CCCGTGGGATGGGACCTAGGCCCTTACAGGCAGCAGTATACATAGGAGAGCACTCTGAGTATGGAAAGACGAGGTTGTCCCAGGAACTCCTGTGTCT
GGGAACTCAGAGGAACCCCGGGTTGGGGGGAAATGGACACCTGCATCCTGTTGTGTTTGCTGTAACAGGATAGCCCGGAAACAGCCCTAACTCTTGT
CAGGCCCCTTCAGACTTGCGTACATTCCTCTAAGAACTCCAGTTTGGTGGGAAGCTCAGACAGAGGTCATGACATTCTAGAGTAAGGGAACTAGGGA
CTAGTCAGATGCCACAGGCTGGATGGGACTCTGCAGGGTGTTTGAGAGCTAGGACCACTCGGTCCCCTCCTTTCTACCCACTAGTAACAGAAGTTAC
TGTTACCAGCCTGACCCCTAAGTGCCTCTGTAGTGCGAGTCTCAGTCCATCCCCGTTTCCTGTAACAAAACACTGCGGTCTGCGGAACTTATACACA
ACAGGAATCTATCTCTCACCATTCTAGAAGTGAGACAACTTCCACTCTAGTATCTCCCAAGTCCATTTATAAGGCCTTAAATCCATTCATGAGGGTG
GAGCCTTCACGGCCAGCCAGTTATCTCTCAACCACCCCACCCTCCAATACCATCATCCCCTAGGGTTCAAATTCAAACACAGGCCTATTGGAGGGAC
ACACACATTCAAAAGACAGCGGTGTGGAAAGCAGAGGGAGAGGGCCAGACTCTGTCGCCCCTCACTCCATCCCCACAGGCCAAGTGTCCTTGTCATT
GTGTCCCAGTGTCTAACCAAAGCCCTAATTTCCCCAAGCCCGAGAGCTTGGTCCAAACTATGATACCTGGGCAAATGTCCAATGGCTTAGCACCCGA
ATAGCTCTGAGCCTGGCGGTAGGATGAGGGTGGGGGGTGGGAGAAAAAAGGTGAGACATTCACACAAAAACATAGTTCCAATCCCCCCCCCCCCAAG
AAAAAAGAAAAATGGAGCCTGTTCCATAACAGTGCTCATTCTCTAAGCTTGTAACCACAAAACACCCATTACCCTCCTCCACAGGATGCATGGGGCT
AGAAAGACTTTAACACAATTTGTCAGGCGGCCTCCCGGTCTGGAATCAGCATCGTGGGAGGAACGAGGCTGGCTCAAGTGCAGGCAGTGGCTGGTGG
CGGGTGGCGGGTGGCGGGCAGCTTTCGGGATGCTGGTACTGAATATTAAAAAGGTTCAGTTGCGACTGTGTGACCACAAGCACGCTGCAAGAAGGCG
ATGCCACTGGCCACGGTCATCCCCAAGGGGAACCTGCCAGAGTGCACGTGGCTTTGTAGATCCTAATGAAGTTACAGATGGGAAAACAGCCCTCGAT
TCCTACCAGGGAGGAAATAATGGAGGGATCACGGAAGGGGAAGCTGGGCCAACCACACAAGCATGCCACCCTGGCCTCAAATACATTGCGCTAGTAT
AACTGGACATCTCCAAATATTTACAGAAACAACAGAACCCCCAGCAATGCTAATTCCCCAAACTGCTGTGTCTCAGAAGTTCTATCCTCAGCTTCAC
GCTGGCCTGCTGCCTAAGACCTGGCCTGATGCACTCTTGTGCCTACCAAGGGTGATCCCCAGGATACAAGAAAGCACCCTGCCTGAAGCCCACCCAG
GTCTTCTTTCTCATTCTGCCCTTCTCGTCTGCTCCATACAACAGCCCCATGCCTCTAAATCTGTGTCCCTTGCCACGCCATCATTCTGCAATTGCCC
CAAGCTCCTTCCATTCCACTAACAGTCCCTTGTCCACGCCCCCCACGCCCAGTCCCANNNNNNNNNNNNNNNNNNNNCACACACACATCAGCCCTAA
CTCAGATCCCCCCTGGCTGTGACCCTAGGCCAAATGTAAGACATTCCCAGGTCATGAAACTGCCCTTTCTGCTAGAAGTGCCGAACCTTTAATAGGT
TCCTGGAGACCTCAGGAAGCAGGGGCTGACCCCTGTCGTTCTCTAGACAGAGCAAGGAGCTGGCTTGTCCAAAGAGACACAGCAATGAGGGGAGGTT
GCTTAAGCTAGCTGTGGAGCCTGAGGGTCTGGCAGAGTTGCCAAAAGGGGGGATGGAGCCTGGCCTACTCTGAATCCCAACCCTGCCGCTCCCCAGC
TGTGTGACCTTCAGCTGTTGCTCAACTGCTCTGAATCTCAGATTTCTCAATTGCAAAACAAGGGAGATTTGGGTAAACACTTAGCACAGAGCCAGAA
TGTTGAGCGAGGCAGCAGCAGGGGAGCTCCCACTCCACAGCCAGATGGCCTGGTTCATGTCTCCGCTCCCTTACGGTGCGGTGCCTCGGTTTCCAAA
CCTGCATAATGGAGTTATTAGTCGTGCCTGCCTCCCAGGATTGAGGTAAGGAAGCAATTCATCTACAAAAGCAAAATATTTAGAAATACCCGGGCAA
GTGATATCATCTTTTGGGAGATAGTTGAGAAATTATAGATTTAAAACATTGCAGGGATGGAGAGGTGGGTCAATGGTTAGAGCACTGGCTGCTCTTC
CAGAGGACCCAGGTTCAGTTCCCAGAATCCACATGGCAGCTATTAACGGTTTGCAAATCTAGTGTCAGATAATGAGGTACAGTGCCATGTATGTGTG
GGGTACATGCCTACATGCAGGCAAGACACTCATACATATAAAATGAAAATAAATCTTTTGTTTTGTTCTGTTTTCATTTTTTGGAAACAGTGTTTCT
CTGTAGAGTCCTAGCAGTCCTGGAATTGACTCTCTAGAAGAGAATGGCCTCTAACTCAGAGATCCATCTGCCTCTGTCTCCCAAACCCTGGGGTTAA
AGGTGTAGGACACCACCCACCGGCATAAATAAATATTAAAAAATAAAATAAAAATGTTTCTTTAAAGAGACAGAGAGAGAAAAGGCACAAGAGATGG
CTCAGTGGGTAGTGTTTGTTGTACATGAGGCCCTGAGTCCAGATTCATAACCCACACTCACAGGCCAGGGTTGGTGTTGCGGACGATGAAGAAACAG
AGATGCTAGAGCCTCTGGCCAACCAAGTCTAACAGAAAGTAGAAGCTTCAGGCTTCACAAAGAGACCCCCATCTCAATAGATAAGCAATAAGTAAAT
GATGGAGAACAGAGGCAGACACCCCAGTGTCTCTCTGCCCTCCACCTGCACACACACGAAGGAGAGAAACTCTTGCTAAGTTCAAGGTCACCACCTT
CAGTTCCTCAGCCCTATGTCTGTTCACACGCAATCCACAACAAACTGGAGGACACCTTAGATGAGAGTCTGGTCTCCCCACAGGGTGGCCAGGAGAG
ACATTTGAGGCACAAGGAGAAGGAGATCACCTGAGGTCTCTAGGGGCCTCTCTGATACTCAGAATCCTAACGCCCTTTAGGTCCACCCTCAATCCGG
TCTGCCAGCATCCATCCTTAATACGAACCTCTCTTGCCTGCAGACAGCTCTTGCCTTGATAATGAGTCTTCTTTGAGAACGAGGTACTCACTTGCGG
GTTTTTTGAGTCAAGGACAGAGTAGGTAAGGAAGAAACAAGCCTATGAGATGGTGGGAATAAAGGACAGAGTCGGAGAGGAGATTCTGAATTCGGAG
GAAGGAGCAGGGATGGGGGAGCTGTATATTGGAGACGAGACATGGAGAGTATATCCAGTGGGCAGATGAATCCGTGTGTGTGAGTGAGTGAGTGTGT
GTGTGTGTGTGTGTGTGTGTGTGTGTGTGTGTGTGTGTGTCCTCCCTCAAGTCTCCTAGTCTCACAGGAAGAAATGATTCCATGGGTGTTTGTTCTT
TTCAAGGGAAAGGTTAGCCGGGGTGTGGTGGCGCACGCCTTTAATCCCAGCACTTGGGAGGCAGAGGCAGGCGGATTTCTGAGTTCGAGGCCAGCCT
GGTCTACAGAGTGAGTTCCAGGACAGCCAGGGCTACACAGAGAAACCATGTTTCAGGGAGGGGGAAGGAGGAAGAAGGTCAAGTTTCCCTACACTGA
GTCCCTGAGGACTCTCACTCTCACCCCAACAGGAACCCAGCTTTTCCACACACCAGGCATCCCAGCCAGGGACACAGATGAAGGCACTGTCAACAGA
AGCACCAGCTAGAACTTCTGTGATCCTGAGGTCACATGGCCCACAGGTTCCTCCCTATTCTGATTTGTATGTGACCCGATCACATTTCCTTGCAGAT
GTTAGGTTTACCCCTTCCCTTGTGCACTTTGAAAATGGCTACTGCCAGCGGGGGGCGTGGTGCCGCATGCCTTTAATCCCAGCACTCAGAAGGCAGA
GGCCAGCTGATCTCTGTGATTTTGAGGCCAGCCTGGCGTACATAGTAAATTCCAAGATGCCCAGGAGAAAAAGGAAGGCAGAAGCAAATGGCTATCG
CTCTATTTTGTCTACTGCCCACTGATCCCACAAAGTTCCCTGACCAGGCTGTTGTGGCACTGTGTCACACCACAGTGACCCCACCGAGTTCTCATCT
CCCAGTGTGACCTACGGGTAGTCTGCCCTGAAGTGGATACCCAAGTCCTCTATCACGAGGGCAGGAGAGGGGACTTCTCAATCCATGTCACAGCTTG
CCTAGGACAGTGTACGTTATGTTTGCTCTAAACAAATATCATTGTGAAGCTGAACAGATGTTGCAGATAAAATGCCCTAAACCCTTTCCCTACGTTT
CAAAGAAGCTGGGAACTCAGGCGTGCTAGTCTTGGATGGTTTCTGCATCTGTGGTCCAGTAACTGGCACGCGCAATCTCTCTTGCAAAGGCAGAGGT
GAATTCTTCTGGCCCCGGGGGTGTTTTCTGCAGCCTGGCTAGCTCCAGACCTGTAATTAAGTCTAGTGGTATGCTGGCAAGGATGTGGAGAAAGAGG
AACACTCCTCCATTGCTGATGGGATTGCAAGCTTGTACAAGCACTCTGGAAGTCAGTCTGGCGGTTCCTCAGAAAATTGGACATCGTATTACCGGAA
GATCCAGCAATACCTCTGCTGGGCATATACCCAGAAGATGTTCCAACAGATAATAAGGACACATGCTCCACTATGTTCATAGCAGCCTTATTTATAA
TAGCCAGAAGCTAGAAAGAACCCAGATGTCCCTTAACAGAGGAATGGATACAGAAAATGTGGTACATTTACACAATGGAGTACTACTCAGCTATTAA
AAACAATTTATGAAATTCCTAGGCAAATAGATGGATCTAGAGGATATCATCCTGAGTGAGGTAACCCAATCACAAAAGAACTCACTTGATATGCACT
CACTGGTAAGTGGATATTAGCCCAGAAGCTTAGAATACCCGAGATACAATTTGCAAAACACAAGAAAATCAAGAAGAAGGAAGACCAACGTGTGGAT
ACTTCATTCCTCCTTAGAATAGGGAACAAAATACCCATGGAAGGAGTTACAGAGACAAAGTTTGGAGCTAAGACGAAAGGATGTACCATCCAGAGAG
TACCCCACCCGGGGATCCATCCCATAATCAGCCACCAAACCCAGACACTATTGCATATTGCCAGAAAGGACCCTGATATAGCTGTCTCTTGTGAGGC
TAGGTCAGGGCCTGGCAAACACAGAAGTGGATGCTCACAGTCATCTATTGAATGGAACACAGGGCCCCCAATGGAGGAGCTAGAGAAAGTATCCAAG
GAGCTGAAGGGGTCTGCAACCCTATAGGTGGAACAACAATATGAACTAACCAGTACCCCCCAGAGCTCGTGTCTCTAGCTGCATATGTAGCAGAAGA
TGGCCTAGTCGGCCATCATTGGGAAGAGAGGCCCCTTGGTCTTTGCAAACCTTGGTACAGGGGAATGCCAGGGCCAGGAAGCGGGAGTGGGTGGGTT
GGGGAGCAGGGCGGGAGGAGGGTATAGGGAACTTTCGGGATAGCATTTGAAATGTAAATAAAGAAAATATCTAATAAAAAAGTCTAGTGGTGGAGAA
TCACCCAAGTGGGAACCATCTTTGCTCCTGCACTACAGCTCTCACAGGACTGGTAGACATGCCATCTTGTTCGAGCTACCACCTCTGTCTACCACCT
ACCCTGCCCGTCATGCTCTGGCTCTGCTGGGTTGGCCGTTGACAATCTCTGGACTAGAAAGCCTGGTCAGGGAATGAACGCGATGAGAACTCGTGCC
TGCTCTAACCACAGTCTCTCTCTCCATCACCCCAGCAGAGCCAACCCTAAGCAGACTACGAACTAGAAGAGCTTCCGAGCTTTAGGTTAAACACAGC
AGAGCAGGGGAAACACAGGAATCACGAGGGATCGGGAGGGAGGGGAGGTTTTGAGGAAGGGAGGAAGGAAGGATGTGCTGACATTTGCTTAGTGTCC
ATTCTAGGGATCCACCTGGCACTGAATCCACAAGTGAGGAAGCCAAGGGTGAGAGCAGGCTGGTGTAACTGACTCATGGTGACACAGCCAGCAGCTG
TGCTAAGATTATATTCCCTACTTCATTTATACTGTGTATTGAAACCTTACCTTATTGAAGTCTGTCCTGTCTGTCTGTCTGTCTGTCTGTCTCTCTC
TCTCTCTGTTTTTTTTTTTTTTTTTTTTTTTCGAGACAGGGTTTCTCTGTGTAGCCCTGGCTGACCTGGCACTCACTTTGTAGACCAGGCTGGCCTC
GAACTCAAAAATCTGTCTGCCTCTGCCTCCCTCCCAAGTGCTGGGATTAAAGGCGTGCACCACCACACCTAGCCTTATTGAAGTGTTTTAGCAATCC
TATTGAAGGCCCATTTTACAGATGGGGAAGTAAAGCCCAGAGAGGGGAAAGTGCCAAAGCCATAAGGCAATAAAACTACTAAAGGATGTCAGCCAGT
TCTAGCTGGCCTCCAAAGGCCAATTTGCATCTGCCCTCTTGCTGCACCATTTAACCACATAGTTGCCTACTCTTATCAAATCCAATCAAATGCAGCT
AGGAGCTAGGCACTGTGCTGGGTGTACATAGCATCTCTCAAAGCACGCTGGATGCAGAGTTCTGTCCTGGGAGGAGGCACGGTCGAATGAGTACCGC
CTTCAGGGAGCAGGGAAACAGCCCGGCTGTGATAGGCTGTCCACTCCTTCTTCCCACTGGGCCCTGCTTCTCTCTCAGGCCTTCTTGGGCCTCCTGG
CTCTGCCATGGAGCCACTGGGCAACATGAACAAGTCACCTGTCTGCTGCAGCTCCTCTAGAGCAAAAGAAAGTTCCTAGATGGAGTGAGTTTTACAC
CCATCCCCTGCGGTTCTGAGGTGCCTTGGGCATATTGACTGGGTGGGGTCAGGGAGCCCACATCTCAGGGCATGTTGACGCCTGGAAGGGGTGCAAA
GTGCCTGGGTGAGGGGCTGAGGAAGCTACTCCACCCCCAGCTGTGGTTTCTGGTGGGGCCACTGGTGGCAGCAGGTGAGGGGAAGTATCTGTCACTC
TTCCAACAAAGGCAATCAAACAAAAGCCTCCTGGGGCATTGTGGGAACTGCAGTAAAGGCGCCAAAAATAAAACACAACTTTCCTTTGATAGGCACT
GGTAGCTGCCTGGGGGTTGTGACAAAAGTGTTCAGATTTCACACCTCAGTTCATACCCCACACACACACACACACACACACACACACACACACACAC
ACCAGTCTCACAAACAAGTCATATAATAGGCAGTCAATGATCCCAGAAGAAACATCTCCGTGGGCTGTGACACATGTCACAAGAACCACATATGTGT
CAAATGGCTTGTCCTTTCCATTTTGAAATGTTCAATATTTTAAAAGAACTTTTAAATATCCTATTTTATTTCATGTATATTGGTTTTTGTCTGCATC
TATGTCTGTGTACCCTACCATTCACAAAGGCCAGATTAGATTCCCTGGAACTGGGATTATAGACAGTTGTAAACTGCCAGGTGTGTGCCTGGAATCA
AACTTGGGTCCTCTGAAAGAGCAATCAGTGCTTTTAAAATATATATACATATGTGTGTGTGTGTGTGTGTGTGTGTGTGTGTGTGTGTGTGTGTGTG
TGTGTGTAAAATTTATTTTATGTATATGAGTACACTGTCGCTATCTTCAGGCATACCAGAAGAGGGCTTTGGATCCTATAACAGAGGGTTGTGAGCC
ACAGTATAATTGCTAGGAATTGAACTCAAGGCCTCTGGAAGAACAGCCAGTGCTCTTGACCACTGAGCCATCTCTCCACCCCTAAAGTTTTCAGTAT
GTTTTAAGCAAGGAGCTGAACGGGGTATTTTGTTCTTTGTCCTTCAAGCTACAGAACCAAACTTGCTAGCATTCATTCATAAATATTCATATGGGCA
GTATGCCTAAAAATTATAAAATACTGATAGGCAAAAGTGCATACATTGCCCACACAGCGAGAGGAACAGACACATAGACCCCCCCCCCCCACACACA
CACACACACTGGTACTACAGGGGCTCCCCTGTGTACACACACTGCAGTACAACTGCTTCCCCCATAAGGGACATTGACACCCACTCGAAAGGCCCAG
AGAGAGCTCAACCACAACCCAGTGACATGAATGGATTGACTTAGCCAGATCAAGGCACCTCGATGGCACTGAAAGGAAGGGCTTAATCTCCTTTACT
GTATCTTCAACTGTCACAGCTGGCCTCTCTTTCGGGCTATGGGCTCATCCACCAACCCTTGCAGCGGAGACTAAGGAAAAGGAGACCTTGGGGAGTA
GAGGAATCCTTGGGAGGAGAGGTTGGGAGGAGGAGAAGAACATTAGCCAAAAACAGCAGGCTGGGCGACAACGGAGGCGCCTAGTGAACTGGCCTGA
GTGGTGGTTCTGAAAGAGCCTGGGGGAGGCGGGGGCAGGTCTTGAACCCAGACAAGTCCGAGCTCCTGCTCTCACATGAACAGCCAATCCCTTGCCC
CACTCCTCTTTCTAGCTAGGTGGCCTTGGGCACATGGCTGAACTTGCTTGGCCTCAGTCTCCATCTCCACGGAATGAGAAAGTATTGTCTGCATGGC
AGGGTTGTGTGGTGCATGTGGAAGTTGCGGCCTCATCTTCTGGGCTCTCCCAACATTCAACAGTTTGCCTTCTTTCCCGGCCTTGCAATCCGACTCT
TGCTTCAGAAACTCCAGACCCCCTCATTAACGGCAGACCTTCAGAATGTGTTTATTTCTTGTCTCCCCACCCCCACCCCACTTCCCAGCCAGATGCA
AGCATGGGAGGTGGCCGTAGTTCAAGGCCCACCCTCCCTTCGGGGACTTTCAACGTTCCTCAGTTCCTTTTGATCCCATAGCTCCAGCCACAAGCCA
AACAGCCCCCAAGGCCTCCAAAGTTTTCTGCCTGTGCTCTCTACCCCTAACCCCAGTGCTGCCTGTAAGAAACCGTTCCAGGCTCTGCCCAGAAGCC
CCTCCATCCTGTTAGGTGATACCAGATGCTCAAAGAGTGACCCAGAAAAACAATTCTTTTCAGCTCATTGTGATGGTGCACATCTGTAACCCCACCA
CGCTGAGGAGGCTAAGGGAGAAAGAGAGAATTCTCGGCCAGCCTGGGCTACAGATCAAGACCCTGTCTCAGAAAAATTCCAACAAAATTGCTGGGGA
AATATGCTCACCATCGGAATGCTTACATAGCATGCATGAGTGCAGNNNNNNNNNNNNNNNNNNNNNNNNNNNNNNNNNNNNNNNNNNNNNNNNNNNN
NNNNNNNNNNNNNNNNNNNNNNNNNNNNNNNNNNNNNNNNNNNNNNNNNNNNNNNNNNNNNNNNNNNNNNNNNNNNNNNNNNNNNNNNNNNNNNNNN
NNNNNNNNNNNNNNNNNNNNNNNNNNNNNNNNNNNNNNNNNNNNNNNNNNNNNNNNNNNNNNNNNNNNNNNNNNNNNNN
MOUSE SEQUENCE - mRNA
GGACATGGACTGCTATCTGCGTCGCCTCAAACAGGAGCTGATGTCCATGAAGGAGGTGGGGGATGGCTTGCAGGATCAGATGAACTGCATGATGGGC
GCAGACTGGGCTAGCTGGAGAGAGACAAGAACCAAAAGCACAGCCTTCCTGTGTGATTTCTACAGCCCCCAGAGCACCATGGACCCAGGGAAACCCA
GGAAAAACGTGCTGGTGGTGGCTCTCCTTGTCATTTTCCAGGTGTGCTTCTGCCAAGATGAGGTCACCGATGACTACATCGGCGAGAATACCACGGT
GGACTACACCCTGTACGAGTCGGTGTGCTTCAAGAAGGATGTGCGGAACTTTAAGGCCTGGTTCCTGCCTCTCATGTATTCTGTCATCTGCTTCGTG
GGCCTGCTCGGCAACGGGCTGGTGATACTGACGTACATCTATTTCAAGAGGCTCAAGACCATGACGGATACCTACCTGCTCAACCTGGCCGTGCCAG
ACATCCTTTTCCTCCTAATTCTTCCCTTCTGGGCCTACAGCGAAGCCAAGTCCTGGATCTTTGGCGTCTACCTGTGTAAGGGCATCTTTGGCATCTA
TAAGTTAAGCTTCTTCAGCGGGATGCTGCTGCTCCTATGCATCAGCATTGACCGCTACGTAGCCATCGTCCAGGCCGTGTCGCGTCATCGCCACCGC
GCCCGCGTGCTTCTCATCAGCAAGCTGTCCTGTGTGGGCATCTGGATGCTGGCCCTCTTCCTCTCCATCCCGGAGCTGCTCTACAGCGGCCTCCAGA
AGAACAGCGGCGAGGACACGCTGAGATGCTCACTGGTCAGTGCCCAAGTGGAGGCCTTGATCACCATCCAAGTGGCCCAGATGGTTTTTGGGTTCCT
AGTGCCTATGCTGGCTATGAGTTTCTGCTACCTCATTATCATCCGTACCTTGCTCCAGGCACGCAACTTTGAGCGGAACAAGGCCATCAAGGTGATC
ATTGCCGTGGTGGTAGTCTTCATAGTCTTCCAGCTGCCCTACAATGGGGTGGTCCTGGCTCAGACGGTGGCCAACTTCAACATCACCAATAGCAGCT
GCGAAACCAGCAAGCAGCTCAACATTGCCTATGACGTCACCTACAGCCTGGCCTCCGTCCGCTGCTGCGTCAACCCTTTCTTGTATGCCTTCATCGG
CGTCAAGTTCCGCAGCGACCTCTTCAAGCTCTTCAAGGACTTGGGCTGCCTCAGCCAGGAACGGCTCCGGCACTGGTCTTCCTGCCGGCATGTACGG
AACGCGTCGGTGAGCATGGAGGCGGAGACCACCACAACCTTCTCCCCGTAGGGGGCTCCCCTGCCCGGACTACAAGGACCTCTCCCAGGAGCCTTAA
TGTGGTGCACACATGCACAGACTCTCCATCCACCGAATTGCTGCTGAGGGAAGAGCAATTCTGGCCAGTCAGGTTGACATGAGGACCTAAGAAACTG
CTTAACCCCATCCCACTTATAACTACCTCAACCAAAGCTGTAAAAGATATGGCTGAGAAGTTAACACTCAAGCCAAGACAGCTATCCCCAAAACGAC
AGCCAAAAGTGAAAGTGAGAGGCTCCACACTTTCCGGAGTGAGGGATGTGGGGCCAGTGAACACCCTGGTTGAGTAGTCTTCGGAGGCCTCTGAATG
AACCTGCTTCTAGCTTAGAGAGATGTCCCGGAGATTCAAGACAGAGCTTATCTCCACACTTAGCAAGCAAGCAAGAGATGACAGTCTCTCTAAATGC
TCCCACAGAGCACCCCTGCCCCTCCCTTCTGCCTCTCCACCGCCTTTCCTGAGGTCCAGGCCACACCATGACGCTGAGGCAGTCCCACCTGGGGCTC
TGGATGGCAATGACAAGTAGTTGGGTCTCTATGATGGGAATAAAAAGGTAGGGCAAAGGTGACAGGAAGGAGAGAAGGTGACCCTGCTGGCTGACAG
AGGCCAGCAAGCTACTTCTTTGTTCTCTGTCAGCCAGCCACTGATACCTTTCCTCATGTTCTGCTTTTGATTCATATATCTTTTATGAAGAAACAAA
TAAAAAAAAAATTTTCCCTCGAGGAAACAACTTGG
MOUSE SEQUENCE - CODING
ATGGACCCAGGGAAACCCAGGAAAAACGTGCTGGTGGTGGCTCTCCTTGTCATTTTCCAGGTGTGCTTCTGCCAAGATGAGGTCACCGATGACTACA
TCGGCGAGAATACCACGGTGGACTACACCCTGTACGAGTCGGTGTGCTTCAAGAAGGATGTGCGGAACTTTAAGGCCTGGTTCCTGCCTCTCATGTA
TTCTGTCATCTGCTTCGTGGGCCTGCTCGGCAACGGGCTGGTGATACTGACGTACATCTATTTCAAGAGGCTCAAGACCATGACGGATACCTACCTG
CTCAACCTGGCCGTGGCAGACATCCTTTTCCTCCTAATTCTTCCCTTCTGGGCCTACAGCGAAGCCAAGTCCTGGATCTTTGGCGTCTACCTGTGTA
AGGGCATCTTTGGCATCTATAAGTTAAGCTTCTTCAGCGGGATGCTGCTGCTCCTATGCATCAGCATTGACCGCTACGTAGCCATCGTCCAGGCCGT
GTCGCGTCATCGCCACCGCGCCCGCGTGCTTCTCATCAGCAAGCTGTCCTGTGTGGGCATCTGGATGCTGGCCCTCTTCCTCTCCATCCCGGAGCTG
CTCTACAGCGGCCTCCAGAAGAACAGCGGCGAGGACACGCTGAGATGCTCACTGGTCAGTGCCCAAGTGGAGGCCTTGATCACCATCCAAGTGGCCC
AGATGGTTTTTGGGTTCCTAGTGCCTATGCTGGCTATGAGTTTCTGCTACCTCATTATCATCCGTACCTTGCTCCAGGCACGCAACTTTGAGCGGAA
CAAGGCCATCAAGGTGATCATTGCCGTGGTGGTAGTCTTCATAGTCTTCCAGCTGCCCTACAATGGGGTGGTCCTGGCTCAGACGGTGGCCAACTTC
AACATCACCAATAGCAGCTGCGAAACCAGCAAGCAGCTCAACATTGCCTATGACGTCACCTACAGCCTGGCCTCCGTCCGCTGCTGCGTCAACCCTT
TCTTGTATGCCTTCATCGGCGTCAAGTTCCGCAGCGACCTCTTCAAGCTCTTCAAGGACTTGGGCTGCCTCAGCCAGGAACGGCTCCGGCACTGGTC
TTCCTGCCGGCATGTACGGAACGCGTCGGTGAGCATGGAGGCGGAGACCACCACAACCTTCTCCCCGTAG
HUMAN SEQUENCE - GENOMIC
AATATATGAAACAAATATTGACAGAATTGTCAAAGAAATAAGAGAAACACATAAAGCAAGAAATAAGAGAAACACATAATTCAACAATAATAGAAAC
TTAAATATCCTCCTTTCAATAATAGATACAACAACTAAGCAGTTGATCAACAAGAAAACAGAAGATTTGAACAATGCTATGAACCAACTAGACCTAA
CGTCTATCTATAAAACACCACCCAACAACAGCAGAATACATATTCTTCTCAGATATACATAGAACATTCTCCAGGATAGGCCATCTGTTAGGACATA
AAACAAGTCTCAAAAAATGTAAAAGAATTGAGATCAGACAAAGTCTGTTCTCTGACCACAACCAGTAACAGAAGGAAATTTGAAGAATCCATAAGTA
TGTGGAAATGAATCAAGGAACTCAAGGGAAATTAGAAAATACTTTGAAATGAATGAAAATGAAAACACAGCATACCAAAACTTATGAGATGCAGCTA
AAATAGTGCTTACAGAGAAATTAATAGCTATTAATGCCTGTATTTTTTAAAAGAAGAAAGATACCAAATTAAAAAAAAACTTTTCACTTTAAGAAAA
AGAATAGTGAACCAAGCCCAAATCAAGCAGAAGGAAGGAAATAATAAAGATTAGAATGGAAAAAAATGAAATATGGAATTGGAAAAACTAGAGAAAA
ATTAACAAACCCAAAAGTTGTTATATCAAAAAGATTGATAAGTTTGATAAACATTTAACTAGACTTACCCTAATATCAAAACCACATACAGATATCA
CAAGAAAAGTACAGACCAATATCTCTCATAAGACACATATAAGATAGATGCACAATTTCTTAACAAAATATTAACATGCCAAATCCAGAAACATTAC
AAAAAAAATTGTATACCATGACCAAGTGATTTATTCCAGGAATTCAAGGTTGGTTTAATATAAAAAAATCAATTCATATAATACACCATATTTAATA
GAATAAAGGGCAAAAACACTCAATTGTCTCAGTGGACACAGGAAAGGCCTCCAACTCCCTCCATGTCCCTCCAAAGGACATTATCTCATTCCTTTTT
ATGGCTGCATAATATTCCATGATGTATATGTAGCACATTTTCTTTAACCAATCTATCATTGATGGGCATTTAGGTTGATACCATGTCTTTACTATTG
TGAATGGTGCTGCAATAAACATACACGTGCATGTGTCTTTATAATAGAACAATTTATATTCCTTTGGGTATATACCCAGGAATGGGATTGCTGGGTC
AAATGGTATTTCTGTCTCTAGGTCTTTGAGGAATTCTATACTATCTTCCACAATGGTTGAACTAATTTACACTCCCACCAACAGTGTAAAAGCATTC
CTTTTTCTCCACATCACCAGCATCTGTTATTTTTTGAATTTTTGATAATAGCCATTCTGAGTGGTATAAGAGGGTCTCTCACTATGGTTTTGATTTG
CATTTCTCTAATGATCAGTGTGTTGAGCTTTTCAAAATATGATTCTGGGTCACATGTATGTCTTCTTTTGTGAAGTGTCTTTTCATGTCCTTGGCCC
ACTTTTTAATTTTTTTTTCTTGTAAATTTGTTTAAGTTTTTATAGATGCTGGATGTTAGACTTTCGTCAGATGCATGGTTTGCAAAACTTTTTTTCC
CACTGCGTAGGTTGTCTGTTCACTCTGTTGATAGTTTCTTTTGCTGTACAGAAGCTCTTTAGTTTAAGTAGATCCCTTAATTTACTTATTTGTCAAT
TTTTGTTTTTGTTACAACTGCTTTTGGCATCTTTGTCATGAAATCTTGGCCCGTGCCTTGGTCCTGAATGGTATTGCCTAGGTTTTCTTCTAGGGTT
TTTATAGTTTTTAGTTTTACATTTAAGTCTTTAATCCATCTTGAGTTGATTTTTGTATATGCTGTAAGGAAGGGGTCCAGTTCCAATTTTCTACATA
TGGCTAGCCAGTTATCCCAGCACCATTTATTAAATAAGGAATCCTTTCGCTATTGCTTGTTTTTGTCACGTTTGTTGAAGATCACGTAGTTGTAGGA
GTGCAGTCTTATTTCTGGGTTCTCTATTCTGTTCCATAAGTCTGTCTGTTTTTGTATCAGTACCATGCTGTTTTGGTTACTGTAGCCATGCAGTATA
GGTTGAAGTCAGGTAGCATGAGGCCTCCAGCTTTGTTCTTTTTGCTTAGGGTTGGCTTGGCTATTTGGGCTCTTTTTTGGTTCCATGTGAATTTTTA
AATAGTTTTTTCTAGTTCTGTGAAGAATGTCAATGGTAGTTTAATGGGAATAGCATTGAATCTATAAATTGCTTTGGGCAGTATTGTCATTTCCACA
ATACTGATTCTTCCTATCCATGAACACGGAATGTTTTTCCATTTGTTTCCATTATTTCTAATTTQTTTGAGCAGTGGTTTGTAGTTCTCCTTGTAGA
TGTCCTTCACTTCCCTTGTTAGCTGTATTCCTAGGTATTTTATTCTTTTTGTGGCAATTGTGAATTGGAGTTCATGCGTGCTTTGGCTCTCTGCTTG
CCTGTTTTTGGTGTATAGGAATGCTAGCAATTTTTGCACACTGATTTTGTATCCTGAGAATTTGCTGAACTTGCTTATCAGCTGAAGAAACTTTTCG
GCTGAGACAGTGGGGTTTTCTAGATATAGGATCATGTCATCTGCAAACAGGAATAGTTTCACTTCCTCTCTTCCTATTTGAGTACACTTTATTCCTT
TCTCTTCCCTGAATATGACTGCCCTGGCCAGAACTTCCAATACTGTGTTGAATAGGAGTGATGAGAGAGAGCAACCTTGTUTTGTCCTGATTTTCAA
GGGGCTTACTTCCAGCTTTTGCCCATTCAGTATAATATTGTCTGTGAGTCTGTCATATATGGCTCTTATTATTTTGAGGTATATTCCTTCAACACCT
ACTTTATTAAGAGTTTTTAACATGAAGGGGTATTGAATTTTATCAAAGGCCTTTTCTGCATCTATGGAGATAATCATGTGGTTTTTGTCTTTAGTTC
TGTTTATGTGATGAGTCACATTTATTGATTTGCATATGTTGAACCAACCTTGCATCCCAGGGGATGATGAAGCCAAATTTGATCATGGTGGATAAAC
TTTTTGATGTGCTGCTGGATTCGGTTTGCCAGTATTTTGTTGAGGATTTTTGCTCAATGTTCATCAAGGATAATGGCCTGAAGTTTTCTTTTTTTGT
TATATTTCTGCCAGGTTTTGGTATCAGGATGATGCTGGCCTCACAGAATGAGTTAGGAAGGAGTCTCTCCTTTTCAATTTTTTTGAGTAGTTTCCGT
AGGAATGGTACTCTTTTCTGTACATCTGGTGGAATTCAGCTGTGAATCCATCTGGTCCTGGACTTTTTTTGGTTGGTAGGCTGTTTATTACTGCCTC
AGTTTCAGAACTCGTTTTCAGTCTGTTCTGGGATTCAATTTCTTCTTGGTTTGGTCTTGGGAGGGTGTATGTGTCCAGAAATGTATCCATTTCTTCT
AGATTTTCTATGCACATAGAGGTGTTTATGATATTCTCTGGTGGTTGTTTGTATTTCTGTGAGGTCAGTGGTAATATCTCCCTTATCATTTCTGATT
GTATTTATTTGAGTTGTCTCTTCTTCTTCTTTATTAGTCTAACTAACAGTCTATCTATTTTATTAACTTTTTTGAAAAACCAGCCTGGATTCATTGA
TATTTTGAATGGTTTTTTTTTTATGTCTCTATCTCCTTTGATTCAGCTCTGATTTTGGTCATTTCTTGTCTTCTGCTAGCTTTGGGACTTCTTTGCC
CTTGGTTCTCTAGTTCTTTTAGTTGTGATGTTAGGTTGTTAACTTGAGATCTTTCTAGCTTTTTGATGTGGGCATTTAGTGCTATAAATTTACTCCT
TAATACTGCCTTAGCTGTGTCCCAGAGATTCTGGTATGTTGTATCTTTGTTCTCATTAGTTTCAAAGAACTGCTTGATTTCTCCCTTAATTTCATGA
TTTACCCAAAAGTCCTTCAGGAGCAGGTTGTTCAATTTCCATGTAGTTGTGTTGTTTTGAGTGAATTTCTTAGTCTTGAGTTCTAATTTGATTGTGT
TGTTGCCCAAGAGACTGTTTGTTATGATTTCAGTTCCTTTGTATTTGCTGAGGAGTATTTTACTTCCGATTATGTGATCAATTTTAGAGTAAGTGCC
GTGTGGTGATTAGAAGAATGTATATTCTGTTGTTTGGGAATGGAGAGTTCTATAGAGATCTATCAGGTCCATATATTCCAGAGCTGAGTTCAGGTCC
TGAATATCTTTGTTAATTTTCTCTCTCAATGATCTGTCTAATGGGGTGTTAAAACCTCCCACTATTATTGTGTGGGAGTCTAAGTCTATTTGAAGGT
CTTTTTGAGCCTATGTCTGTCTTTGCATGTGAGATGGATCTCTTGCAGATAGCATACCAATGGGTCTTGGTTTTTTATCCAGCTTGCCACTCTGTGT
CTTTTAATTGGGGCATTTAGCCCATTTACACTTAAGATTAGTATTGTTATGTGTGGATTCAATCCTGTCATCATGATGCTAGCTGGTTATTTTGCAG
ACTTGTTTATGCGGTTGCTTCATAGTGTCACTGGTCTGTGTACTTCAGTGTATTCTTGTAGTGGCTGATAACAGTTTTTCTTTTCCATATTTAGTGC
TTCCTTCAGGAGTTCTTGTAAGGCAGGTCTGGTGGTAATGAATTCCCTCAACATTTGCTTGTCCTGAAAGGATCTTATTTCTCCTTCGCTTATGAAG
CTTAGTTTGGCTGGATATGAAATTCTGTATTGGAATTTCTTTCCTTTAAGAATGTTGAATATTGGCCCCCAATCTCCTCTGGCTTGTAGGGTTTCCA
CTGAGAGGTCTGCTGTTAGTCTGATGGGCTTCCCTTTGTAGGTGACCTAGCCTTTCTCTCTGGCTGCCCTTAACATTTTTTCTTTCATTTCTACCTT
GGAGAATCTGATGATCATGTGTCCTGGGAATGATCTTCTCATGGAGTATCTCACTGGGGTTCTCTGCATTTCCTGAATTTGAATGTTTGCTTGTCTA
GCTAGGTTGGGGAAGTTCTCCTGGAAAATATCCTGAAATATGTTTTCCAAATTGTTTCCACTCTCCCCATCTCTTTCAGATACCCCAATCAGTCATA
GATTCCGTCTCTTTACATAATCCCATATTTCTTGGAGGTTTTATTCATTCCTTATCATTCTTTTTCTCTATTCTTATCTGCCCGTATTATTTCATAA
AGACAGTCTTCAAGCTCTGAGATTCTTTCAGAGGAAGAATCTTTCAGAGGAAGACTAAGCAGAACTTGGCCTATTCTTCTATGAATACTTCTGATTG
CATTGTGAAGTTCTTGTAGTGTGTTTTTCAGCTCGATCAGGTCAGTTATGTTCTTCTCTATAATATCTATTTTGGCTGTCAGCTCCTGCATTGTTTT
ATCATGATTTTTAGCTTCCTTGCATTGGGTTACAACTTGCTTCTTTAGCTCAGCGACGTTCATTTTTATCCACATTCTGAAGTCTACTTCTTTCATT
GCAGTGATCTTAGCCTTACCCCAGTTCCAAACCCTTGCTGGAGAGATGCTGCAGTCATTTGGAAGGAAGAAGGCACTTTGGCTTTTTGAGTTTTTAG
TGTTTTTATGCTGATTCTTTCTCATCTTTGTGGGCTTATCTACCTTTGATTTTTGAGGTTGCTGACCTTTGGATGGGGTTTTGGGGTTTCTTTTGTT
TTTCTTTTAACAATCTGGCCACTTTTCCATAAAGCTGCTGTGGCTTGCTGAGGGTCCCCTCCAGACTCTAGTCACTTTGGATTTTCCAGTACCTGGA
GGTATCACCAGTGAAGGCTGTGAAACAGCAAAAATGGCAACCTGCCCCTTCCCCTGGGAGCTCCATCCCAGGGAGGTATGAACCTATTGCTGGCCTA
AACACACCTGTAGGAGATGGCCGGAGACCCCATTTGGGAGGTCTCACCCAGTCAGGAGGAACAGGATTGGGGAGCCACTGAAAGAAGCAATCTAACC
ACACTTCCGAAGAGAAACTATGCTATGCTGGGCACCACTTGCATCCCCAGTTGGCTTGGGATCTCCAAAGCCTGGAGACTGGTGTGGCTAAGTCGCC
AAAACAGCAAAGATGGCAGCCTGCCCCTCCCCCGAGGAGCTCTGTCCCAGGAAGTCTTCAAATCTCTGTCAGCCAGAGAACATCGACAGGAGTGGCT
GGAGGCCACAGTTGGGAGGTCCTGCCCAGTGAGAAGGAATGGATTAGGGACCCTCTTAAAGAAGCAGTCTGGCCATATTTTGGTAAAGCAGCTGTGC
CACGTTGGGAGATCCTTTCAGCCCCCAGTTGGTTTGAGCTCCCCAAAGCTGAAAGGCTGGAATGGCTGGGATGCCCAAACAGCAAAGGTGGCAGCCC
TCTCCACCATCCAGGCACCCTGTCCCAGGGAGAGATCAAAATTTTATGGGCTGTAGAAAATGGGCAGAGGTGGCTGAAGGCCTTGTTTGGGAAGACC
CACCCAGTGAGGAGGAATGGATAGGAGTCCTGCTTAAAAAAACAGTCTGGCCACGTTTTGGCAGAGCAGCTGTGCTGTGCTGGGGGATCCTTTCCAC
ACCTGGTGGGTTTGGACTCTCCAAAGTCTACAGGCTGGAACAGCTGAGTCGTCCAAACAGCAAAGGTGGTGCCCCTCACCCCCACCCCAGCCACCCC
CAGAACTCCACCTTGTCTCAGGTAGGTGCTACACTGTTGCCCGTGGCTGGCTGGAATTCCAAGCCAGTTGGTCTTATCTGGTGAGGTGCTGTGGAAG
TGAGGCCCACAGACCAATGCTGCTCAGCTCCCTGGATTCAGCCTCCTTCCTAGGGGTATGTACAGACCTCCTGCCTTGCCTGAATGGCGGTCACCTT
TGCTGGGGTTCCGGAGCCTGAGTATGTAAAGCTCCTGGGTGTCTGTGCATGCCTGAGCAGCTGCTCTGCCAATAATCCAATGCAGCTCTGTGTGTAA
GACCCAAAGGCCTGGTGGAGTGGGTTCACAGGGGATCTCCCGATCCAAAGGTTGCAAAGATCGGTGGGAGAAGCATCATTCCCCAGGTTTGCACATT
CACTCACCACTTCCCTGGTGGGGGGAGGGGAGGGGGTTTCCTTTGGGTCTGTGTTGCTCCTATGTAGGCCATTGCCCTGCCCTGCTTTCCTCTATCC
TCTGTGGGTCGAGCTGATTCCTTAATCAGTCCCAATGCAAGTATCTGGATGTTTCAGATAAAGGTTTTGAAGTACCCACCCCTTTGTTCCTCTCTGA
GAGAGCCATGCCCCATACCTGCTTCTAGTTGGCCATCTTTGAAAATAAAATTAAGAAAACAATTTCATTTACAAGCACATCAAAAAGAGTAAAATAC
TTAAGAAAAAATTTAACAAAGAAGTGAAAGACTTGCAGCCTAAAAAGTATAAAGAAATTAAGGAAGACCTAAATAAATGAAAAAAATCCCATGTTCA
TGGACCAAAAGACTTTGTTAGAATGGCAATACTCCCTAAATTGATTTACAGATTCAATGAAATTCCTATTAGAATCCCAGCTGGTTTCATTGCAGAA
ATTGATAACCTAAAATTCATATGGAAAAGAGAGAGATGCAGATTAGTCAAACAATGTTTAAAAAGACAGATAAAGTTGGAGCAGTCACAACTCCCAA
TTTCAAAATTTGCTATAAAGCTACAGTAATCGAGACAGTGTGGTACTGTCATAGGACAGACACAGAGATTGATAAAATAGAATTGATAGTCTAGAAA
TAAACCATTACATTTATGATGAATTGATTTCCAACAGAGGTGCTAAGACAGTTCAATGGTGGAAAAAATAGTCTTTTCAACAAATGATGCTGGGAAA
ACTAGATATCCATATAAAAAATGAAGCTGGATCCCTACCTCACACCATATGCAACAATTAGCTCAAAATGGATCAGATCTAAATGTTGCAGCTAAAA
CTATAAAAGTCTTAAAAGAACATATACGAATAAATCTTTGTATACTTGAATTATGCAATGGTTTCTTAGATATGGCACCAAAGACACAATTGACAAA
AGAAAAATAAATCAATTGAACCTCCACATTTAAAACTTTGCGCTTCTTTTGCCAGAGATTCAGGTTTTAAAAAACAAAAAGCCTTTGTGCTTCAAAG
GACGCTATCAAGAAAGTGAAAAGATGATCCATAGTAAGGGAGAAAATATTTACAGATATGTATCAGATAAGGGATTGTAACCAGAATATATAAAGAA
GTCTTACAACTCAATAATAAAAAATAAATAACCCAATTTTTTAAATGGGCAAAGGATTTGAATAGAAATTTCTCAAAAAATAATACAAATGGTCAAT
AAGAGCATGAAAAGATGCTCAGCATAGGTAGTCATTAGGAAAACGCATATCAAAACTACAAAGAGGCCGGGCATGGTGGCTCATGCCTGCAATCCCA
GCACTTTGGGAGGCCGAGGCTGGCAGATCACCTTAGGTTAGGAGTTTGAGACCAGCTTGGCCAACATGGTGAAACCCCGTTTCTACTAAAAATACAA
AAATTAGCCAGGCATGGTGGCACGTGCCTGTAGTCCCAGCTACTTGGGAGGCTGAGGCAGGAGAATCACTTGAACCCAGGAGGTGGAGACTGCAGTA
AGCCAAGATCGTGCCACTGCACTCCAGCCTGTGCAACAGAGTAAGACTCCATCTCCAAAAAAAAAAAAGAAAAAAGAAAAAAAACACAATGAGATAC
CACTTTACAGCCACTAGGATGGCTAGAATCAAAAGAATGGACAATAGTAAGTTTTGTTGACAATGTGGAACCCTCACGCATTGTTGATGGGAACAAA
ATGGTGTAGTCACTTTGGAAAACAGTTTGATAGTTCGTCAAAATGTTAAATATATAATTACCATATGACTCAACAATTTCACTTCTAGGTATATACC
CAAGAGAAATAAAGCATATGTCCACACAAACACTTGCACATAAATATTTATAGCAGCATCATTCATAATAGCTAAAAGGGAAAACAGCCCAAACATC
CAACTGATGACAGACAAACAAAATGTGGCATATCCATACAATGGAATGTTATTCAGCCATAAAAAGGAATGGGGAATGGATCCATACCACCACATAG
GTAACCTTGAAAACACTAACTGAAAGAAGCCAGATGTGAAGGTCACATATTGATACTTCTATTTATGTGAAATGTTCAGAATAGGAAAATCTATAGA
GCCAGAAAGTAGATTTGTGGTTGCCAGGGGCTTTCGATGACAGGAGGGGAGGGGAGCAGTCATTGCTAGTGATTACAGGGTTCTTGAGAGGGAGTGA
GAAAAAATGTTCTAAAATGTATTGTGGTGATGGTTGCATAACTCTGTGAACATACAAAAACCATTGAATTCTATACTTTAAAAAGGTAAATTTTATG
GGATGTGGATTATAGCTCAATAAAGCTGTCATTAAGAAAGGAAAAGGAAGGGAGGGGAGAAGAGGGAAAGGGGAGGGAGGGGAGGGGAGGGGAAGGG
GGGAGAAAAAAGATACATCGTGGCATATCTCTTCCCTTTTACCTGTCATTATGTGTCAGTGCCTCCCATTGGCCTAAACTACCCAGAAGCCAGAGGG
AAAGCCATTTGGGACTATATTCCACTGTGACACTGAGCAGAGCAAGGGAAGGATGGGGACACTTCTCTCACACATCTCTGACTCCCCAACATCTAAC
CCATGGCCTGGCATGTGATATTCATGCTATAAATATTTGTTGAATCAGTAAATGGCCCCTCATCTAGATTCTGCCAGGCAGCGCAGGGGGCTTTTTG
AATGTAAATGACCTAATGATTCAGGATCCTATGACCAGCGACTGTCACCCTCTGTCACCTTTCTTCTGCCCCTTTATCTCTGAAGGCATTGAAGGGG
CCCTGCATGAGTCAGGGAGGGCTGGGGGGAGGAGCAAGGGTGGGAGGGGCAGGGAAGAGGGTGGCTTCTCCGACAACTTAAAAGGGGCTTGAACCAC
TTCCTCCCCAGACAGGGGTAGTGCGAGGCCGGGCACAGCCTTCCTGTGTGGTTTTACCGCCCAGAGAGCGTCATGGACCTGGGTGAGTGAGCCTCTT
CATGTGAGAAGGAACAGTACCAGGGTCTTGGACACCCAGACTGACCCTGTGGAATGGGGGTGGAGGATGCGGGTGGAGCGCATAGGGGTGCTTCCTG
GAGAAATCAGTTCTGATTTGGTGGGCATTGGAAGCTACTTCCAGAGAATGCCCCCTGCTGTCCCAGGAGGGGTGCACCTGCCCTTTCAGACCTGGAG
AAGGGGTCAGCCTTTGGTGCCAGTGGGGACAAGGGAGGGGCCGAGATCATGTCTTTCTAAAACAGCAGGGACATAAGAGAGTGGCGGGGCTGGGCTT
GGTGGTCTGGCAGAACCTGTTCTCATCATGAGGGTGATAGGTTAGGCCCTCTGGGACCTCTGGGGACAGGTTTCAACAGAGAAATTCTCCCTAGAGA
GCTTAGGACCTTTTACCCACTCTCTGATTCCCACCTTTCTCCCCTGCCAAATATTCATATACCTGTCCACTTGGGGTCATGAGGAGATGCAAATGAA
ACGTGACTGGGTTGTGAGAATGGTGCGGTGCATTGCAAATGCAAGCTCTGGTTGCTTTCTCTCTGCTGCACATCCCACCTGCTTTGATCTGGCTTTG
CTGTTGCCTCTTGCAAGTTAAGGAACGGGCAGGCAACATGGAATGGGATGGCAAGGGGCACTCAGCTTGGAGAAATCATAGCCAGGCCTTCAGCACA
GCCCCTGCCCCTGAGCAAACCTCACGCACTCTGCCCCGGCAGATAACTCTACTCTTTAGAAAGCCCTTTCTCAGGTCTAACCTAGAAGGGGTCAAGG
GGAAGCACTGAGGGTGTTCTGAGTGGTTCATCCAGCTCCAGACGCCCCCTTTATAAATCTCAGCTGTGGAGTCAGACCAGGCTGAGGCTAAGAAGAC
CAGGTTCCTAGATGGCTTGTCTCACCAGCAAACAATGCACCACGGCGGCCTCAAAGCCGCAAAGGGTTGGCTTTAAAAAGTGAAGGTTCCCTGGTGC
TGTCCTCACACCCCTCCTCGCCACACCACAGCCTCCTTGATTTCATCTCTTACTTTCCCGCCTGCCCTGAACGCTGGATCTGGACCCAGCAAACAGC
TGTGAAAGGGTTAAAGTGGTCACCCCACCCACTGACTGTGAACTCCTGAAAGGCAGGTTCAGGTGCTTTGAGGATGTGAGGAGAAAATGTCTGCGGA
ATGAATGAATACACCGTATCAAGAACTCCGTAGAGTTTAGTTTTTGAAAATCTCTTCCAAATGCCTCATTTCCCAGCCAATCTACCCTTAAATCCCA
CTCCCCTGCACCCCCTCCACCACCCCCCATCACAATCCCACAGTACAGACGTCACCCACAGAAGACCCTGCTCCAGCCTTTCATACTGGCCTCCAGG
AAGGAAACCAAGCAGTGCCCAGTGGTGTGCTACTGGGCATTTGAAAAGCAGCTCCCCGGGGTGGAGCACTGGTAGCTGACTCCAGGGTGGAGGGAAA
GTCCTGAATTTGTAGTGCTTGCCAATTTCCATGGTGTAAATTCTCCCACCCTGGCTGATTGATTTCAAGCCATCTACATGACTGAACAGGGGGTTGG
GAAGATGTGCAGAGTGTCTTACCCCAGACTAGGTTTAGGGGTGCTAGACTCCTAGGCTTTGATGCAGGGAGAGAGGGTAATCTCTGGTCCAGGAAGA
AGGGATATTCTTGCCACTTCACTCAACTTGAGAGAGCCCCAACGGTCAAACCCGAAATACTGGTAGGAGGGGAAGCCGCTGACAAGCTTTACTCAAA
ACGGGCTCTCTGGGCCGTTGATGGGGTGGGTGGGCCTTGGAGGATCTGTTGTTCTGCTCTTCATCTGCCCAGCAAGGAGCAAGAGGTGGGTGAGGAG
GGAGGGTTTCTGTTACACAAAATGAAAACTCCCAAGCAGGGCTGAGCTGGCCTTTTTCACGGTTTGAATGAGCAGCTCTGAGGCACCCTCCCCACCT
TCGAGCAATGAGACCGAAGATCTTTCATAATTCTCAAAAGCAAAGCAAGGAAAAAATGAACCCATGAGAGATGTGTGCCTCACAGCTCGGACATAAA
TGGTGGCAAAGGGGGATGCTGAAGCTAATTCAGGGCCAGTTTCTTGCCTGCCAGAAACTTGGCTGGGGAGGAGAGGAACGCTGCAGCCTGGGGTCGC
TGTTGGAAAAAATCTCTCCTCTTTGCTTCGGACATTCAGGCAACTCTCATTGTTTGAGGGATTCAGGGATGACCAGTCTGGTGGGGAGAGTGACACA
TATGTCACAAAGCCACTGCAACAGAATAAGATACAGCATTGACCAGGGCAAGGGCAAGACAAGAAGGGAATAGTGAACCTGGGTCAGAGAGGTATTT
AAGGTGGGTTTTCAAGGGTGTGTAGGAGTTGTCAAGCCCAACAAGGAGCTGCAATGGGCCCAGGATGTGGCAGGAATGGCAAACTCCATTGCCATCA
GAGGCCGACAAGGTAATAGAGGGAATGGGCATAAGGTGCAGGAAGTGGAGGGGAGTAGAGTGACCCAGAGGGTGCATGCCCCACCTAAAGGCATTCA
AATCTATTATTTCAAAAACTCCATGCTGACAAGCAGAGTGTCCTGGGGACTAAGGCTGCAGCCGTGTAGATGGTCAGCTGAGACAACAGTAACAGAG
ACAAGAAAGAAGCAAGCGGAGGGGAGGGTGGAGTAGCTGGCCATGCCAAGGAGGAAGATGAGGAGGAAGGACGCAGGCACAGGAGACCCAATCCTTA
AAACGTGGTACGGCATCCCTAAGGAATTTGAACTTTATCCTGAAAACAATGGGGACCCATCAAAGATTTTTATTTTTCAAGTAGGTGAATTAAAGGA
TGAGATTTGTGTTTTGGAAGGAGTTCTGTGGCAGCAAAGAGGCAGCAAAGCCCGTGTCAGAACAGAGGTGGGGCCGGCTCTTTTGGGGGCCGGGATG
TTGGGGGATGGAAGCAGGAAGCACTGGTGGCCAGTGGGGCATGGGGAGCAAAGATTCCCCTCATGCTCCGTGGAGCGTCCTAGATGCAGCAGGCTCA
TCAGAAACACAGCCTGATGCAGTAGCCAGAGCCCAAACCTTGCTATCCTGTTCAAATCTCAGGTCCCTCTCTTAGCAGCTGTGTGGCCCCAGGCATT
TGGCTTAATCTCTCTGGGCCTCTATTTTCTGGAATCTAAGATGAGGATCACCAGGGTAGCTCATGAGATGTTATGAGGGAGAGACACATACAGACCC
AGTGGCCGCACAGAAGGATGGTTAGGAGTGTGGTTGCTGGAGTTGGAGGGTTTCAAAGCCTGCTCCCCTGCTGGCCATTGTGTGACTCTGAGAAAGT
TACTTGCTGTGTTTCAGTTTCTCATTGGTAAATGGGGATAATAGTAGCGCCTACCTCATGGGGCTTTTGAGAGGATGAAATGAGACCATACATGCAG
ACAGTGTGGCACGCAGTGAGAGCTCAGTGAATATGAATTATCTCATTGGATACAGCAGTTGATAACATAGAAAATGCAAGGTCTACCAGGCTCTCAC
CCATCCCTGCCTACTGTCTGAAAGTGGATTCCCCAGATCTCTAGACCTCTCACCACCTCCCTGCTTCTCCTCTGCCTCCCTTATCCAAAAAAAAAGA
GAGAGAGAGAAAAGTTGTGTTGGCAGGTGAGGAAGTTCAAAGAGGAAAAAGCTTGGGGTCGCTCTTGGGGCGAGCTGATTGGGCAACTGTGATTTCC
TGGGCAGTCTGGAGGACCTGGAAAAATGTGGGGATGGAAGTTCATGGTTTGGAGATGGGGGCAGCCAGCCAATAATTTTCTTTCCTGGATGGGCAGT
CTCTCATGTTGGGGGCTCCGGTTGGAGTTCTAGGGAATTTTCATGATGATCATTACTGAAAACTCAAGAACTCAGAAAACACCCAACATCTAGGTCA
ACCACTCCTTAGCCCCAGAGATTCCCAACTTCATTGGTCTCACTGAAGCTGCTGCCCAAGACCAGTTTCTTTATGACTTTGTAACAGACAGGGATGA
TCTGACTCAAGGCCACTGACCAGGCTCCCTTTTGCCACATACAAGAGTTCCCCTAAGTTTCCCTGTGATGTTTCTTGAAAGCCACCTGTTTTGGACC
TACAAGACCCTTGCTCATCCACCTCCTCCAAAACACCTGGAATGAGAAATCACAGGCACACACGCCAGCACTCCCCCAACTCCCCTCCCCTGACGGG
AACAGCAGGAGTGGGACAGCGTCCGGGAGAAGGGGTTATCAACAGAGTTCAACAGAAACACAGTTCTTGCTCCTCAGATCTCACCCGTTGTGACTTA
TCAAAACTTTGAGGTTTCTCATTTCTCCCTGACAGTCAGAGCGGGCTTTCTCTAGAGTAACCGAAAGACACTTACGTGTTTTAAAGAAACCTCGAGA
CTCGACCTCTAGATGAGTCAGTGGAGGGCGGGTGGAGCGTTGAACCGTGAAGAGTGTGGTTGGGCGTAAACGTGGACTTAAACTCAGGAGCTAAGGG
GTAATTCAGTGAAAAAGGGGAATGAGCGGTGGGGAGCTCTGTTGCAACAGGGTCCAATCGCAGCAGGACTACAAATGCCCGAGCGCAGGCTGGGAAC
GAGGGGACAGCGGCTGCCTGTCCCCAGAATAGAAAATGCAGCTAGGAAGCCCTCTTTGAGTGGACAGCGGAGGACTGGACTGCCAGGCCAAGCATCA
GGGGCTTCATCCTCAGGGCCGGTTAGAGCCCCTGAGGATTTAGGAGGAAGGTGAGGTGGGGACTGCCATCAGAGCTAAGCTTTAGGCAGATGTGTCT
AGCAGTAGTGTGCAGGACTATTTGCTCAAGGCGGGAGAAATACCTAFTTATTTATGTAGCCCGATGCAGTCTCTCCTTCCCGGAGGAACTCCCAAGC
CCAGAATCCCTGGCTTTACACAATTTCCGGGGAACACATTAACCAACTGCAACCTGGGTGCCATGCAGGGAGGCTTCCAGCAGGTGGTGCTGTGGCC
AAGGACACGGAAGCGCTGGGCTCTCACTGCTTCCCCAGCCTCCAGGAGAAGGTGCCTTAAACAGGTTCCCACGCATTTCCTGGCGCTATTGAGCTTG
GAGCTGCCAAGGGCCTGCCTTCACTTGTGGCATCGCAGTTACTGACTCTCCAGTGGGCCAGGCCCTACCTAGCTGGGACCTGAGGGTCAGGATACGG
GAAGAGGGCTACTGCCGCCCTGACTTGTAGGTAAGCTAAAACATCTAGGCAAATTACTCTGTCAACTGTCCTCCCTGCTCAGCCTCAGGAAGAAATA
AGTTCCTGCTGGGCCCCAGGCTCAGCCACAAAACCAGACTGAGCACATCTGGGCCTTGTGCTACACCGGGGTCCCCATCAGCTGCTCAGACCCCAGG
AAGCCTCCTGACTTCCAGAACACGTCGCTTCCCAAAGCTGACCCTGTTCCCCCTTTCACCTGCCCCCCAAGCCTAAGTTAGAAAACAAGTTAAAGGA
GAGAAAGTGTGTGCAGGCACTTCAGTTAAGCAAAAAAATAAAGAAGTCGTGACATCAGGAAAGAGCGTCCTTCCCCCACACTGCAACAGGACAGCAT
CCCTTCTGTGTCCTCTCGGGCCATCTTGATGCCCTCTCCCTTGGAAAAAGGACAGGCATTCGTTTACTTGTCATTCATGTATTTATTCATCATTCAT
GTATTTATCATTCATATATTCATCAGCACACAATTGTGGGGCACCTCCTCAATTCTGGGCCTGCACAAGATAAAAGGGAAGGGATCTCTGTCCCAAA
GGCAGGCCAAGGGTGTGCGCCCAGTGGACCAACAGTCAGTGCTGAATGAATGTCATTTCAGTGAGGGGGTGTTGTGGAGCTGGTGGAGCCCTGAGGC
AGTCTCCATCGCTGTGGACCAGTAAGGAACCTCATCCCTCTACCCAGCCTGTGAGGTCATCCTCCTTCCTCAGCCCACCTCCCTCAGGAGACACTCA
GGCTTGGCTTCATGCACGTGTGGCTGCGCACTCACCTGGATGCCAGGAAAATGCTCCTGGGCCAGTGGCTACCAGCACCAAAGCAGGGCTGGAAACG
TGTGCACCTACCCCACGACCTCATAGCTTTGCCGCCTCATCCCACATCAGGTGGAGTGGGAGGGGGCACTCAGACCCACCAACCAAGCTCAGTCTTG
AGGGGTGGTCTGGGCTAGAGAAGACTTCCCAGCTCCAAGAAGCAGCCCAGATGGGCCAAGACAGGGGGTGGGAGGGGCTGCCCTGCATTCTGATGCT
GCTTCTTTCCAGGACCTGGGAGTGGAGGAGGACAAGAAGGAGGTGAGGACAGTGATGCCGGGCAGCAGGCCAGGTGTTCAAAGGCACAATCTGGTTC
TGATGTTCTCTTTCAGCAAACACAGTGCCTGGAGCTTGGGAGGAAAGTTCCCAACAGCGTCTCCCCCTCCACTGCTTTCTTTAATAACAAAGACTTG
TCCCTGCCAAGCAATAACTTTCTCGCCTTGTCTCCTACAGGGAAACCAATGAAAAGCGTGCTGGTGGTGGCTCTCCTTGTCATTTTCCAGGTGAGGT
TCTCTGCCAAGGAAAGCTCTGTTCCCTTCTCCACACGGCCTCCCAAGTCAGGGGTTTAGTGGAGGAGCTGGGCATTTGCTAGAAGATACAAGACCCA
GACATAAGCCCGCCTGCCACTCATTAAGCTAATGGCTGCCCCCTCACCATCTGCTGAGTGACCCTGGAGAGCCACAGATGTTCTCTGGACTTCCTTT
ACTCCATTTAGGTTAAAACATGGGGGAAAATAACTTACCACCTTCCCTATCCCACCTCCAATCTCCCTGCCCAGGAGACAGAAATATGGACTCTGAG
TTCTTAGAGAGAGAAGAGCTGCAAAAAGCAAAAAATGTTACTGGGTTTTGTGCACGTGTGCTGAGAAAATCACCCTGGATCTGGCGATCTTGTTACT
ATCCTATCGCCCCAAAGTTGTCTCTTTCCAACCTTCACCCAAAGGCTTCCCTCGCAGCCCCCGTTTTCTTTGGTGAAATAGAGACCCATCCGGCCTC
CCTGGCAGGGGAGGGAAGAGAGGATGGGGCCCTAGGGATGGGGAGAGGGGTGGATGAGCACACACTTTATAGCAGGCCTGAACTCGGCAGGAACAAA
GACCCTCACTTTACAAAGTTCTGTTTCTCCATCCAGAAACAGACAGAAAGTGTGCCTCACCAAGTGCCAAAGTTAGAAGAAACTGTAACTCGCAGAG
TCAACTTTCTCCCATTTGTTAGAGGTGGGAGCTCAGAGTAGGGGTAGGGGAGTCCAACTGAGGCCAGAGCTAGAGAGGCAGTGCTTCAGAATTCGGC
GGCCCCCCGGAGCCTGGGCTGCAGCCCATAGCCTGGCCCCCTTCCCCATCACCACTCCCTCCTCTCTCTCCCCTGTCTCCAGGACTCTGGGGGGCTG
TATTGCTGGCAGTGGAGGCTGGAAGGGTGGGAAGGGGAGGAGGACAGCTGAGGCTCATTCTTCCCTTTCACTTGGGGAGGGGGTGCTCAGATAGGGC
AGGATGTGGTGGGGCTGTGGGCTGCAGAGGCAGTGAGGCTAGGGGAGGGAGAATTATAAAACAGGAACAAGGTTCAAGGGGAGAAGGGAAGGCAGGA
CTGGATGATGCAGAGTGCACTTCATAGAGGCCGGGAGTACTGCCCTCCAGGAAGGCTGAGACCCCCTCATGTCCAGGGACCCCGGGTCTAAGGCCTT
GGGCCGTAACCATGGCTGGGCCAAAGGCAGCAGCCTCCTTCAGGGCTCCCAGGCTGCAGCCATGCCCAGGAAAGGGAAGAGGGGTTGCCACTGACTT
TTCGTCTCAGGCTAGCAATGGCCAAAGAAAAGGCTCCTGGACATCATTTTGTCCTCACCATGTTCCCAAGCAGGACAGTGATGAATCCAGAACTTGG
GTGTGAAAAAGAGATAGAGACAAGATGCGGTGAATCCCTCCAGCATAAATGGATAGAAACCCACCGTCGCTGAGCTGCTGAATCTGGTTCCTGGTGA
TAGAACCATGAGCCTCGTGAGGCAGGTCCTCCAGCCCAGCTCCCTGCCCTGCACAAACCCGTCCATCGCTGTGCGCAGAGGCAGGGGCAGGCATGGA
CCCCCTCCTTCATTGATAAAATCACAGCAGGCTGCTGAACCTTCACCCGACCCTGCAGACGGCTAAAAAAAGCTCCAGCAGCTGAGTCCTGCTGATT
GGGATCTGCCGGAAGAGATGCGAGGAAGAGAGAGGCAGAGAGGTGGGGGGAGAGGGCGGGAGCACAGAGGGAGAGTGGGAGATGAGAGCTGCGCTTC
CTTCCAGGGACACAGCTGCTGAGGAGTCCTCGCCCCCACCCCCATGGCCCATCATCCATTCACGGAGTTTATGGCACTTGGGCTCACGTTGCCTGAG
CTCCTGCTGGGTGCTAAGAGGGGACCCAGGATCTAGAGTCTCTCCAGGTCACCCACCACCCATGATCACAGCAGTTTGCCCCAAACCCAAGGCTTCA
TGGCCTCAAAATGGGAGCATTTGCCTTCCTCTCTTCTTACTCCAGGCCCTCCTCAACCTTGACCCCCAGGTGGATTTTCCCCCTAAAGCTGAGGTCT
TTTGTAAGCCCCCTGGAAAACTCCACCAAGTTCTAAAGGAGGGTCAAGAAGAAAGACACATGTTCCCTCTCTCACGGAGCTTCCAGGGGGCAAAATT
AAAGCTCCATGGAGAGGAAATGGTGCTGGAGCCTGGGCTAGGTACCTCACAGCAACCATGGGAAGCAAATAGGATTCATCTCCATTTCACAGAAGAG
AAAACTGAGGCTCTGAGAGAGAGAGAGAGAGACAGAAAGAGTTTAACCAGCTCAAGGCTCATCTGGCCCCAGAGCCCAGCTGATTTCCAGTCCCCTG
TCAGCACATGTAGAGTCTCTCAGACTTGGCAAAATCAGCCACTTGCTACTTACTAGCAGAACTGTAGAATCTCAGGCCCCACCTTAGCCTACTGATT
CAGGATAGACATGTTCACAGGATTAATCAGGTGATGCGTATTGGAGTTAAAATTTGAGAAGCACTGATTTAAAACCAAAGAATCACCTGGAGACTTT
AGGAAAACACAGATTCCTAGACCCATCACTTGAGATTCTGGTTCAGAATTCTCAGGTGGGGCCTGAGAATTTGCATTCCTAACAAGTTCCCAGGTGA
TGCTATGATACTGATGATGCGGACCTCACGATGAAACCACTATTCCTCCCGCCTGGGCAACATGGCAGAATCCCATCTCTACTAAAAATACAAAAAT
TCCCTGGGTGTGGTGGCATAAGGCTGTGGTCCCAGCTACTCAGGAGGCTGAAGTGGAAGGATCACCTGAGCCTGGAGAGGCCGAGGCTGCAGGGAGC
CATGATTGCACCACTGCACTCCAGCCTGGGCAACAGAGTGAGACCATGTCTCAAGAAAAAAAAAAAAGAAAGAAACCACTGCTCTAGGCTAAATCCC
AGCCAGAGTTGGAGCCACCCAGCTAAACTGGCCTGTTTTCCCTCATTTCCTTCCCCGAAGGTATGCCTGTGTCAAGATGAGGTCACGGACGATTACA
TCGGAGACAACACCACAGTGGACTACACTTTGTTCGAGTCTTTGTGCTCCAAGAAGGACGTGCGGAACTTTAAAGCCTGGTTCCTCCCTATCATGTA
CTCCATCATTTGTTTCGTGGGCCTACTGGGCAATGGGCTGGTCGTGTTGACCTATATCTATTTCAAGAGGCTCAAGACCATGACCGATACCTACCTG
CTCAACCTGGCGGTGGCAGACATCCTCTTCCTCCTGACCCTTCCCTTCTGGGCCTACAGCGCGGCCAAGTCCTGGGTCTTCGGTGTCCACTTTTGCA
AGCTCATCTTTGCCATCTACAAGATGAGCTTCTTCAGTGGCATGCTCCTACTTCTTTGCATCAGCATTGACCGCTACGTGGCCATCGTCCAGGCTGT
CTCAGCTCACCGCCACCGTGCCCGCGTCCTTCTCATCAGCAAGCTGTCCTGTGTGGGCATCTGGATACTAGCCACAGTGCTCTCCATCCCAGAGCTC
CTGTACAGTGACCTCCAGAGGAGCAGCAGTGAGCAAGCGATGCGATGCTCTCTCATCACAGAGCATGTGGAGGCCTTTATCACCATCCAGGTGGCCC
AGATGGTGATCGGCTTTCTGGTCCCCCTGCTGGCCATGAGCTTCTGTTACCTTGTCATCATCCGCACCCTGCTCCAGGCACGCAACTTTGAGCGCAA
CAAGGCCATCAAGGTGATCATCGCTGTGGTCGTGGTCTTCATAGTCTTCCAGCTGCCCTACAATGGGGTGGTCCTGGCCCAGACGGTGGCCAACTTC
AACATCACCAGTAGCACCTGTGAGCTCAGTAAGCAACTCAACATCGCCTACGACGTCACCTACAGCCTGGCCTGCGTCCGCTGCTGCGTCAACCCTT
TCTTGTACGCCTTCATCGGCGTCAAGTTCCGCAACGATCTCTTCAAGCTCTTCAAGGACCTGGGCTGCCTCAGCCAGGAGCAGCTCCGGCAGTGGTC
TTCCTGTCGGCACATCCGGCGCTCCTCCATGAGTGTGGAGGCCGAGACCACCACCACCTTCTCCCCATAGGCGACTCTTCTGCCTGGACTAGAGGGA
CCTCTCCCAGGGTCCCTGGGGTGGGGATAGGGAGCAGATGCAATGACTCAGGACATCCCCCCGCCAAAAGCTGCTCAGGGAAAAGCAGCTCTCCCCT
CAGAGTGCAAGCCCCTGCTCCAGAAGATAGCTTCACCCCAATCCCAGCTACCTCAACCAATGCCAAAAAAAGACAGGGCTGATAAGCTAACACCAGA
CAGACAACACTGGGAAACAGAGGCTATTGTCCCCTAAACCAAAAACTGAAAGTGAAAGTCCAGAAACTGTTCCCACCTGCTGGAGTGAAGGGGCCAA
GGAGGGTGAGTGCAAGGGGCGTGGGAGTGGCCTGAAGAGTCCTCTGAATGAACCTTCTGGCCTCCCACAGACTCAAATGCTCAGACCAGCTCTTCCG
AAAACCAGGCCTTATCTCCAAGACCAGAGATAGTGGGGAGACTTCTTGGCTTGGTGAGGAAAAGCGGACATCAGCTGGTCAAACAAACTCTCTGAAC
CCCTCCCTCCATCGTTTTCTTCACTGTCCTCCAAGCCAGCGGGAATGGCAGCTGCCACGCCGCCCTAAAAGCACACTCATCCCCTCACTTGCCGCGT
CGCCCTCCCAGGCTCTCAACAGGGGAGAGTGTGGTGTTTCCTGCAGGCCAGGCCAGCTGCCTCCGCGTGATCAAAGCCACACTCTGGGCTCCAGAGT
GGGGATGACATGCACTCAGCTCTTGGCTCCACTGGGATGGGAGGAGAGGACAAGGGAAATGTCAGGGGCGGGGAGGGTGACAGTGGCCGCCCAAGGC
CCACGAGCTTGTTCTTTGTTCTTTGTCACAGGGACTGAAAACCTCTCCTCATGTTCTGCTTTCGATTCGTTAAGAGAGCAACATTTTACCCACACAC
AGATAAAGTTTTCCCTTGAGGAAACAACAGCTTTAAAAGAAAAAGAAAAAAAAAGTCTTTGGTAAATGGCAAATGAGCGTGTCTTTGTTTTGCAATC
CCCCACACCCCACCTGACCGTCCCCTCTCCCCTCCTCCCTGCCCTCTCCCAGGCCTCGTTTCTTAGAGACGCTCAGAACCACAAAGTTGCTCAGGAA
TGCTCTGAGCCCGTCTGGTGACACAGGACCAAGAGGCTGAAAGGTAGAAGGAAGATGAGGACAGGAGGTCCATCTTGCAAATACCCTTCCAGAGTTC
AAGGGATAGGCCCCAAGCCTGCACAGTCAGCACTGAACCGGACATGCTGATCCTACTGCAGCTTTGGGAAGGCCAACTTTTCCGGGTAACCTCGATA
CCTGGGGACTCTGCATTTAGCAGCTCTTGCACAGTAGCCTGCTCACCTGTCCCAGCTCAGACCAGAACTAGAGCCCTTAACCTTTTGTCAGCCCCTT
AGACTCTGAAAGCTGGGGTTTGGAGGGAGGGCCTTTCTGTGGGCTTGGAGACCACAGCATACTGGACTAGGGGTCAGGGATGAGACCCTTTGCTGGC
ATGAGAGCTGGAACCACCCATGATCCTCTCTGCTAGCCACTGTAGCAGCAGTGGCCTCCGTGGTGTATGTCATAGTCCCTTCCTGCTGGTACAACAA
AATGCCACCGATGGAGTAATTTACAAACCATAGAAATGTATTTCTCACAGTTTTAGAGGATTGGAAGTCCAAGATCAAGACGCCAACAGATTCAGTG
TCTGGTGTGGACTCTCTCTGCTTCCGAGATGGGGCCTTGCCATGCCCTCTGGAGGGGACAAACACTGTGTCCTCATGTGGTAGAAGAGTGGAAGATC
ACAATGAGCCTAACTAGTTCCCTCCTGCTCTTTTATTGCTATAAGGGCATTAATCCCGTTCACAAGGGTGGAGCCTTCATGACCTAATCAACTCCCA
AAGGCCCCCCCCAACTTCTCATACCATTGCCTTGGGGTTTATGTTCCAACCATATGAATGTCGGAAAGATACATACATTCAAACCATAGTGTGGATA
CTGACTGTGGAGGAGCAGGGAGAGAGGGACAGACAAAGGCCCCCACACAGGCCAGGTGTCCGTGTCATTTCGTGCCTTGGTGCCACCCAGAGCCGTG
ACTTCTGCAAGCCAGAGAGCAGGTCAGTCCAACCTACAATGCGTCAAGAGGGGTCTGAAGGACCCAGAGCTGCAATAGCTCTGGGCCGTGGGGAGCT
AGAGGGAGGGCTGAGGCACTCACGCAATAGGTGATTCCATCCATTTCCCCAAGTGGAAAGAGCCTCGTTGAAAATGGAGCTGCCTGGTAATGACACC
CATTCGCTCATCTCGCAAGCACGTGACATTACCCTCCTCCGAGAGATGCACTGGGCTGGAAGGTTTTTAACAAGATTTGTCAGCTGGTCTCCAAGCC
GGGAATTGGCGCCCTGAGAGGAATGAGCCTGGCACGGATGCAGTCAGCGTGGAGCGGCGTTTGCAGCAATGGCATTAAATATTAAAAGGCACAGCTG
CGACTGTGTGCGTGAGCGTGTGGCCAGGGGGCAATGCCAGTGTGCGTGTGTGTCCCCGAGGGGAACCTGCCGGAGCGCATGTGCGTGTGGAGCCCGC
TGGTGTGGACATCCTAATGAGGTTACAGATGGGAAAACAACCCTCGGTTCCTGAAGGGGAAGAATGTAACAGAGCAGTCATGCAAAAGGCAGCCAGG
CCAGCCGCACAAATGCGCCCCCTCAGCTGCAGATACATTTTTCTAGAATAACTGGACATCTCCAAATATTTACAGAGAAAACAAAACCCCCAGCAAT
GTCAATTCCCTCGAACTGCTGTGTCTCAGAAGTTCTGACCTCGGTTCAGTGCTGGCCTGATCCCTGCTCCCTTGCCCGAGGCTCTCATGTGCCCATC
TTGAGCTTGGGGTGACCCCTGGGAAGAAGGAAAAGGCCCCCTGGGAGGCCCACCCAGGGCTTCTCTCTTCTTTTCTTACCTGCTTCATACATCTGAA
CCCTCTTCCCAGGTTCACAGCCAATAAGCCTTCTCCAGTCACCTGAAATTTCCTTTTCATTTCATCCCCAGGCCCTCATCTCCCTCATCCTTGCTGG
CTGCAACCCCAAGCCAAGCCCAAGGTATTCCCAGGCCACAGGTCTTCCCTTTCAGCTAGAAGCACCACACCTTTCTCATCACAGACTCACAGAGCTC
CAAGGGACCTCAAAGATCAGCTGGGCCAATCCCCCAGTCATTTTCTAGATGGTGAAACTGAGGCCCAGCGGGGAGAAGCTGACTTGCCTGAAGAGGC
GTGGCAATGCAGGGATATTGGTTAAACTTGCTTTGGAAGCCTGAGCGTCTGGCAGGGTTGCAGGAGGGTGTGGGGGAGAGCAGAGACTCTGGAGCTC
TGCCGACTTTGAATCTCATCTCTACTGCTTCCCAGCTATGTGACCTTCAGCTGTTGCCCAACTGGTCTGAGTCTTGGGTTTCTCAACTGCAAAATGG
AGAGGATTTGTGTAAACAGTTAGCACAGTGCCTGGAATGTTGAGTGTGGTGGTGAGGAAGAGGGACTTTGCAGCCAGACTGCCTGGTTTGAACCCCG
GCTCCACTGCCTGGGCTGGTTACTTAGCCTCCCTGTACCTCAGTTTCTTAATCTGTATAATGGGGATACTAATGGTACCTATGTCCTAGGATTGTTG
TGGAAGGCAACGAATCCATATATGTAAAATGCTTAGAAAAACTTACATATGTGTTGTTGGTAATCTTTAGGAGATGTTTAAGAAACGGTAACTTAAA
AAAAAAAGTTGCTAACCACAAGGAAACCAAATTCAATTCCTTAGCCCATTTCCATCCCCACAGAATTTATAATTCAAGCTGGAAGGCAATTTAGAGA
TGAGTGAATCTGGCCTTTCCATCCATTGCATGGTGAGTCAACTCGTGCTCTGAGAGGGAAGCAACTAGCCTGAGGTCTCTTGGGAGGTCTTTGCAAT
GCTGGAACTTTAACCTAGTTCCCTGGGCTCCTAACCAGAGCTCTTCCCACCAGACCCTGCTGGGCTCACGGGAACATCCCTGCACATCCACCGTGGC
ACCCGCCCTCATCCCACGCTGTCTCGTTCTCTCCGGCAGGCACCGTTCATCTTGTCCTTTGATTAGGTCCTTAAGGAGAACCTCCCTTCTCCCCTTT
AAATAGTTCCTGTCCTTATCACTGAGTCTGGAGAATGAATGAAATATAAAAGAAATATGGCAGCGGTCCCAAAGGAAATCAGGCAACTGATCTTTTT
AAGAAAGGAAGATGGGCCGTCTTCTCTGGGAATGGTTCTCAGTTACATGTCTTTGTTGAGGGTGAACAGTTGGAGGAAAAGAAACAGACCTAAAGGG
ATTGTGGGGGGAATTAAGGCAAAGGAGATGGGGGAAAGGCAGGGGGAAGATGGGGCAGGAATGGGTTTTAGGGAATATACACTGGGGGCGGGACTTG
AAGCAAATCTTCAGTGGGTAGTTAGATGTCCCATCCTGCATGCACACACATGCATGTGCACACACACACACACACACACACACACACACACACACAC
ACATAGAGCCTCCCCAGGTCTCCCAATCTCAGGTGAGGAGAAGGGGGCTCTATTAGTCTTAGAGACAGGTGGGCCCATGGCCTTCTTTGCAGAGAAG
ATGGTTAGAATCGGTCATGTGTCTCTGGTCTGAGACCCTAGAGAAACTCCAAGGAGAATAAAAAAGGTTGGGGGGGGGCCTCTCCCTCAACTCAAAA
GAGCAACCCTATCAGGCTTCAGAAAAGCAAGCCCTCCTAGCACTCCAACCCACGGGAGCAGCTGTCTGAGAAGTCCCAACTCCTCCAGCAGCCACCC
CCTCTGTTCCTTCACTTCTCTTGGGCCCAGGCAGAGACACAGACAGGAGTCTGTGTGCAGAAAAAGCTCCCCAGGCCCTTTTCTGTGGAGAGCTGCT
CCAGACTAAGCGAATCTCAGCTGATCTCGTGCGAAATCAGAAACGCCAGGATGTGTATTCCCCACGGGCTCCTCTCTTTGTGTCTGTGCATGACCCA
ATTCAGACTCCTCTGCCGCTGTCAGATTCTCTCCTGCCCATATTCACTTTGAGGATGGATATAACCTTATTTTTGTGTGTTGTTCACTAACCCCAGG
GACTTCGCTAGCTGGGCTGTCCTACGTGGTACAGTAACCACCACATAGTGTGGCCTCCAGGTTCTCATCTCTGGGTAAATAAACATCTCCGCACAGG
CTTGGCCAGCTCTGGACTGGCTCAGTTCCTGCATGATGCAATAGGTCTCCAGGTCACATATCCGTGCCCACTAGCAAGAGGGAAGGTAAGGAGATGG
TTCTTGCCCTGAAGTCCTCTTGTTCCTGTGTCAGAGTTTATTTAGGACAGAATAGTTTATATTTGCTCCAAGTAAATAATATCTGACATTGGGAAGC
ACAGCAGATGCAGCAGATGAGATGCCCCCAAACCATTTCCCAATGTTTAAAAAGAGGCCTGGAAAGGACAAGCTCATTGATCTCATTTGGTTTATGA
AACTGCACTCAAGTGACTGAAGCAGAAACCTGACCACGTGTAAAGACTGAATGGCTCAATCTGCTTCCCAGGCCCAGAGGGTGTTTTCTGTGGCCTG
GCCCAGGCCTATGGTGAAGCCGGTGCTAGGGGGTCACCTATGTGGGAGCCAGCTCTGCCTCCTGCCCCGAAGCTCCAGAGACTTCTCCTACAACTGA
CTCTCTGGACACGCCCTCTTGCTTGCACTAGTATCTCTTACCTGCCACCTGCCCTCCTCCACACACCCCGATTTCAGGGAAGCTCAGCTGCTGAGAG
TGCTATTGACAACCTCTGGACTTGGAAATCAGGAGGAAGGGAATGGGAAGAATGGTGGCAGCTTTGTGCCTGGGCTGTTCAGGAAGACATCCCTCTG
CCTTTGTTCTCCAGGGCAAGACACAGGGCTAGACACGCCGGAATCCTTAAATCCTTTGTCAAAAGCAGAACTGGGATTTTCGTCCAAGGACTACACC
TGTCCTGTCCTCAGCCTCCTTCTCAGTTGCCCCCCTCCCACCCATGCTCATCAGAGCCGAACCCTGAGGAAACCATGGACCGAAAGACCTTGTGAGC
TTTTGTTGCTGGGAGTGTCAGAGGCTGGGAGACAGAAGGTATGAGAGATGAGATGCCATGGAAGGGATGGCAGCGATCACAGAGGCTGGGGGGCAGA
GGAAAGAGACGTTGAAGAGGTGGAGGGGTAATGAACCTAGGCGGGAGACAGGCTAACATTTACTAAGTGCCCGTGATGCACCAAGGACTAGGCTAGC
TATACAACCTTTCATTGAATTCTTATGACAACAGAGAAGGAAACAGGTTTAGAGAGCTCATGTAACTTACCTGTGGTGACACAGCTAGCAACTTTAT
TAAGATTTTGTTACGTACTATACACTGTATTAAGCATCAGTATCTTATCTCATTTAATCCCCACAACAACTCTACTAGAGTCTCATTTAATAAATGA
GGAAACTTAGGCTCAGAGAGGTTAAGTAACTTTATCAATGTCACACAGCTACTAAGTGATTTCAACCAGTTCTAGCTGCCTCCAAATTTCTTGCTTT
AGTCACCCTACTTCACCGTTCAACTAAACAGCTGTTTAATACCAAATATTTCTGGAGCCCCTACTGAGTGCCAGGCACTGTGCTGTGTCCAGCCAAC
ATCTTTCAAACCCTGCCAGACACAGAGCTCTGACCTGGGAGAAGGGAGAATCAAATAACAAAGACACAGCCCCCACCTGCCAGGGGCTGTGACCCCC
ACAGCTGGGCAATAACCAGGTCTTTGCTGCTCCACAGTACCTTGTCCCTGCTTCTCCCCTCTAGGCCCTGCTTCTTACCTAGGCTTCCTCCATGGGC
TAGCCCTGCAGATGACTGAGAGGGCTGAGATGGCTTTGCCACAGACTAGTCACTGGGCAATATGGGCAGGTCACCTCCCTTTTCTGGGCCTCCAGCT
CCCCAGCTGTACAATGAGGTTGCTGGACCAAATCATTTCTACCCATCGCCTCCAGCTCTGACTTGCTATGGGTGCCTTGTCTGGGCAGAGTCTGGGA
GGCCAGTGCTCAGCGGGGTAGGGCTCTGGGCATGTTGATGCTTGCACGAGGTGCAGGGCAAGTGTGTGAGGGGCTGAGGAAGCTGCTCCACCCCCAG
CTGTGGTTTCTGGTGGGGCCACCATGGCAGCAGGTGGAGGGAAGTGTTTGTCACCCTTCCAACAAAGGCAGTCAAACAAAAGCCTCCCAGGGCACCA
TGGGAATAGGCGGCAAGGGCGCCAAAAATAAAACACACTTCTCCTTTGATAGGCATCGGTGGCAGGCATAGGCAGCTGCTAAGGGAGTCTGTCCTTG
GGGTGGTGAGGAAAGGGTTCAGATTTCGTGCCCAAGAACACTCACACTCACAAGAGCTGTCCCACCTCACAAACAGCCCACACATACAGATGCTCAA
TATTCACACAAGAAACACCACCGCACACATCACACACACACACACCAACACAGCAGTCACACAATCAGCATACACATATACACATACAAATAGAAAA
CTTGCCCCCATACAAGACCAGCTTCATGGGCCGCGACCTGCACAGTCACTCTGGGCCCTGCACTAAGGCCCTGCACTAAGGCCCATGCTGGGTATAA
TGCTTTGCTGCCTGCACTTTGAAATTCTTAATTATTTTTAAACAAGGGGCGCAGCATTTACATTTTGCAATGGGCCCTACAGGTTCTGCAGTTGCTC
CTGTGGGTGTGCACTCATGAGAGCGTTCACTACCTGCTTAAGCATACCTTTTAACACTTTTACACTGTTGATGGGAGTGCAAATTAGTTCAACCATT
GTGGAAGACAGTGTGGTGATTCCTCAAGGATCTAGAACCAGAAATACCATTTAACCCAGCAATCTCATTACTGGGTATATACCCAAAGGATTACAAG
TCATTCTACTATAAAGACATATCCACACGTATATTTATTGCAGCACTATTTACAATAGTAAAGACTTGGAACGAACCCAAATGCCCATCAATGATAG
ACTGGATAAAGAAAATGTGGCACATATACACCATGGAATACTATGCAGCCACAAAAAGGAATGAGATCGTGTCCTTTACAAGGACATGGATGAAGCT
GGAAACCATCATTCTCAGCAAAATAACACAGGAACAGAAAACCAAACACCACATGTTCTCACTCATAAGTGGGAGTTGAACAATGAGAACACATGGA
CACAGGGAGGGGAACATCACACACTGGGGCCTGTCAGCGGGTAGTAGGGGGCAAGGGAAGGGAGAGCATTAGGACAAATACCTAATGCACGAGGGAC
TTAAAACTTAGATGATAGGTTGATAGGTACAGCAAACCACCATGACACATGTATACCTATGTTACAAACCTGCACATTCCGCACATGTATCCTGGAC
CTTAAAGTAAAATTAAAAAAAAAAAAATCCTACCTATATAGACAAGAGTGCATCCGCTACACACATACACACAGATGCACAAACACATGCATGCCAC
AAATGCAACACCCACACAAACAGCAATAGCCCCCCATGTTCACGCGCCAAAGCACACACATTGATACCCAGAAGGGGTCCAGACGCTCACAAGCAAC
GCTACAACATGCAGCCTATGCCCTGCAGCCTGCTGACACAATTCAATTGACTTAACATTGGGGGCAGCAGAACAATGTGAAGGGAAGGGGCTTGGAG
AGAAAACAGGTTCATGTCCTCCACCTGCAAACATCTCCCACCTCTCTCTTCGGCCCTGGGCTCACCCACCCCACTCAGCGGCTGGGACCAGAAGAAA
GGGAGAGCCAGGGAGGTGGGCGCATGGACGGAAAGGGGACAGGGATGGAGGTGGAGAGGGAGAGAGAGAGGGCAAGAAAGAACGGGTGGGGAGTGGG
GGCAGGAACTGAGTCCCCAGGTGAGCTGGCCCCAGCAGTGGTCTCATAAGAGCTCAGAAGGTCTTGGACCCAAAGCAGTAAGAACAATGCCCCTGTG
CTCCCCGCAAGCACAGGGCGGTCCCGCCCTCAGAGTCAGTCAGAGGATGCCCACCTCCCTTCTTACTAGCTACACAGCCTTGGGCACGCCGTGTAAC
TCCGGGCCTCAGCTTCCTCCTTTGTGGAATGGGATAGCCAATTCTACATTGCAGGGTGGCAAGGCACACACAGACACAACACCTCCTGGATTCCTGC
AGCAATCAACAGCTCGTCTCGTGATCAGGCCTGCAATCTGATTCTTGGCACAGGAACTCCAGACCCCCTCATTACAGCAGACATTTGGAACGCGTTT
ATTTCCCATCTTCTCCTGGTCTCACTTCACACCTCACAGCCAGGTACAAGCACAGAGGTGGATGTAATTCATGGCCTCATGGCCACCATCACTTCAG
GGACCTTCAGGATCCTGCAGCCCCATCCTGCCCCACCCCCTACCCAAACCAAGCAGGACTCCAAGGCCTGGAAATTTTTCTTCCTCCTCTATTCTTT
TTTTTTTTTTTTTTTTTTTTTTTGAGACGGAGTTTCACTCTTGTTGCCCAGGCTGGGCAATGGCGCGATCTCGGCTCACCACAACCTCCGCCTCCAG
GGTTCATGCCATTATCCTGGCTCAGCCTCCTGAGTAGCTGGGACTACAGGCACCCACCACCATGCCCGGCTAATTTTTTGTATTTTAAGTAGAGACA
GGGTTTCACCGCGTTAGCCAGGATGGTCTCGATCTCCTGACCTCATGATCTGCCCGCCTCGGCCTCCCAAAGTGCTGGGATTACAGGTGTGAGCCAC
CGCGCCTGGCCTCCTCCTCTATTCTTTACCCCCAACCTGTATTCTCCACCCCCAACCCTAACCTTCCTGATTTATTTATTTATTTATTTATTTATTT
ATTTATTTATTTAGAGACAGAGTCTTGCTCTGTCGCTAAGGCTGGAGTGCACTGGCTCACTGCAACCTCTGCCTCCCAGGTTCAAGTGACTCTCCTG
CCTCAGCCTCCCGAGTAGCTGGGATTACAGGCATGCGCCATCACGCCCAGCTAATCTTTGCTTTTTTTTTTTTCTTTTTTTTGACAGAGTCTCGCTC
AGTCGCCCAGGCTGGAGTGCAGTGGCACGATCTCGGCTCACTGCAAGCTCCGCCACCCGGGTTCACGCCATTCTCCTGCCTCAGGCGCCCGAGTAGC
TGGGACTACAGGCGCCCGCCAATATGCCCAGCTAATTTTTTGTATTTTTAGTAGAGACGGGGTTTCACTGTGTTAGCCAGGCTGGTCTCGAACTCCT
GACCTCTAGTGATCCGCTCACCTCGGCCTCCCAAAGTGCTGGGATTACAGGCATCCCTATTTAAAATTGTCCCAGCCTCTGTCCCTTCCCTGAAAAC
CCCATCATTCTGTTAGGTGATACCAGATTCTTAAAGAGTGATTCGGGAAAAACGAATGGGCCCTAAGGGGCATGCCAGTGTGCCCCATTCCAATTAC
AGTCACCCACAGGAGAGAGGAAAGGTCGTCCAAGTGGCCACCAACAAGAAACTATTTCATCAGATTTCTTTTTTGTTTGTCTGTTTGAGACGGAGTC
TCACCCCGTCACCCAGGCTGGAGTGCAGTGGCGCGATCTCGGCTCACTGCAACCTCTGCCTCCCGGATTCAAGTGATTCTCTTGCCTCAGCCTCCCA
AGTAGCTGGGACTACAGGCACGCACCACCACATCCAGCTAATTTTTGTATTTTTAGTAGATACAGGGTTTCACCATGTTGCCCAGGCTGCTGTCAAA
CTCCTGACCTCATGATCCGCCCACCTCAGCCTCCCAAGGTGCTGAGATTACAGGCGTGAGCCACTGCGCCCGGCCTATTTCTTCAGATTTCTTATAG
GACATAAGTCACTCAGATCCCCTCACAGGCTTTCTGTCAACTTACTGAGAGGGAAACTGAGTCAAGGAAGAGTGAAGTGACTTGGGTGAGCAGCAGA
GTTGAGGGTTGTGGTCTTTCTGATGTGCAGTCTCCATGAGACCAGATC
HUMAN SEQUENCE - mRNA
GTGAGACAGGGGTAGTGCGAGGCCGGGCACAGCCTTCCTGTGTGGTTTTACCGCCCAGAGAGCGTCATGGACCTGGGGAAACCAATGAAAAGCGTGC
TGGTGGTGGCTCTCCTTGTCATTTTCCAGGTATGCCTGTGTCAAGATGAGGTCACGGACGATTACATCGGAGACAACACCACAGTGGACTACACTTT
GTTCGAGTCTTTGTGCTCCAAGAAGGACGTGCGGAACTTTAAAGCCTGGTTCCTCCCTATCATGTACTCCATCATTTGTTTCGTGGGCCTACTGGGC
AATGGGCTGGTCGTGTTGACCTATATCTATTTCAAGAGGCTCAAGACCATGACCGATACCTACCTGCTCAACCTGGCGGTGGCAGACATCCTCTTCC
TCCTGACCCTTCCCTTCTGGGCCTACAGCGCGGCCAAGTCCTGGGTCTTCGGTGTCCACTTTTGCAAGCTCATCTTTGCCATCTACAAGATGAGCTT
CTTCAGTGGCATGCTCCTACTTCTTTGCATCAGCATTGACCGCTACGTGGCCATCGTCCAGGCTGTCTCAGCTCACCGCCACCGTGCCCGCGTCCTT
CTCATCAGCAAGCTGTCCTGTGTGGGCATCTGGATACTAGCCACAGTGCTCTCCATCCCAGAGCTCCTGTACAGTGACCTCCAGAGGAGCAGCAGTG
AGCAAGCGATGCGATGCTCTCTCATCACAGAGCATGTGGAGGCCTTTATCACCATCCAGGTGGCCCAGATGGTGATCGGCTTTCTGGTCCCCCTGCT
GGCCATGAGCTTCTGTTACCTTGTCATCATCCGCACCCTGCTCCAGGCACGCAACTTTGAGCGCAACAAGGCCATCAAGGTGATCATCGCTGTGGTC
GTGGTCTTCATAGTCTTCCAGCTGCCCTACAATGGGGTGGTCCTGGCCCAGACGGTGGCCAACTTCAACATCACCAGTAGCACCTGTGAGCTCAGTA
AGCAACTCAACATCGCCTACGACGTCACCTACAGCCTGGCCTGCGTCCGCTGCTGCGTCAACCCTTTCTTGTACGCCTTCATCGGCGTCAAGTTCCG
CAACGATCTCTTCAAGCTCTTCAAGGACCTGGGCTGCCTCAGCCAGGAGCAGCTCCGGCAGTGGTCTTCCTGTCGGCACATCCGGCGCTCCTCCATG
AGTGTGGAGGCCGAGACCACCACCACCTTCTCCCCATAGGCGACTCTTCTGCCTGGACTAGAGGGACCTCTCCCAGGGTCCCTGGGGTGGGGATAGG
GAGCAGATGCAATGACTCAGGACATCCCCCCGCCAAAAGCTGCTCAGGGAAAAGCAGCTCTCCCCTCAGAGTGCAAGCCCTGCTCCAGAAGTTAGCT
TCACCCCAATCCCAGCTACCTCAACCAATGCCGAAAAAGACAGGGCTGATAAGCTAACACCAGACAGACAACACTGGGAAACAGAGGCTATTGTCCC
CTAAACCAAAAACTGAAAGTGAAAGTCCAGAAACTGTTCCCACCTGCTGGAGTGAAGGGGCCAAGGAGGGTGAGTGCAAGGGGCGTGGGAGTGGCCT
GAAGAGTCCTCTGAATGAACCTTCTGGCCTCCCACAGACTCAAATGCTCAGACCAGCTCTTCCGAAAACCAGGCCTTATCTCCAAGACCAGAGATAG
TGGGGAGACTTCTTGGCTTGGTGAGGAAAAGCGGACATCAGCTGGTCAAACAAACTCTCTGAACCCCTCCCTCCATCGTTTTCTTCACTGTCCTCCA
AGCCAGCGGGAATGGCAGCTGCCACGCCGCCCTAAAAGCACACTCATCCCCTCACTTGCCGCGTCGCCCTCCCAGGCTCTCAACAGGGGAGAGTGTG
GTGTTTCCTGCAGGCCAGGCCAGCTGCCTCCGCGTGATCAAAGCCACACTCTGGGCTCCAGAGTGGGGATGACATGCACTCAGCTCTTGGCTCCACT
GGGATGGGAGGAGAGGACAAGGGAAATGTCAGCGGCGGGGAGGGTGACAGTGGCCGCCCAAGGCCACGAGCTTGTTCTTTGTTCTTTGTCACAGGGA
CTGAAAACCTCTCCTCATGTTCTGCTTTCGATTCGTTAAGAGAGCAACATTTTACCCACACACAGATAAAGTTTTCCCTTGAGGAAACAACAGCTTT
AAAAG
HUMAN SEQUENCE - CODING
ATGGACCTGGGGAAACCAATGAAAAGCGTGCTGGTGGTGGCTCTCCTTGTCATTTTCCAGGTATGCCTGTGTCAAGATGAGGTCACGGACGATTACA
TCGGAGACAACACCACAGTGGACTACACTTTGTTCGAGTCTTTGTGCTCCAAGAAGGACGTGCGGAACTTTAAAGCCTGGTTCCTCCCTATCATGTA
CTCCATCATTTGTTTCGTGGGCCTACTGGGCAATGGGCTGGTCGTGTTGACCTATATCTATTTCAAGAGGCTCAAGACCATGACCGATACCTACCTG
CTCAACCTGGCGGTGGCAGACATCCTCTTCCTCCTGACCCTTCCCTTCTGGGCCTACAGCGCGGCCAAGTCCTGGGTCTTCGGTGTCCACTTTTGCA
AGCTCATCTTTGCCATCTACAAGATGAGCTTCTTCAGTGGCATGCTCCTACTTCTTTGCATCAGCATTGACCGCTACGTGGCCATCGTCCAGGCTGT
CTCAGCTCACCGCCACCGTGCCCGCGTCCTTCTCATCAGCAAGCTGTCCTGTGTGGGCATCTGGATACTAGCCACAGTGCTCTCCATCCCAGAGCTC
CTGTACAGTGACCTCCAGAGGAGCAGCAGTGAGCAAGCGATGCGATGCTCTCTCATCACAGAGCATGTGGAGGCCTTTATCACCATCCAGGTGGCCC
AGATGGTGATCGGCTTTCTGGTCCCCCTGCTGGCCATGAGCTTCTGTTACCTTGTCATCATCCGCACCCTGCTCCAGGCACGCAACTTTGAGCGCAA
CAAGGCCATCAAGGTGATCATCGCTGTGGTCGTGGTCTTCATAGTCTTCCAGCTGCCCTACAATGGGGTGGTCCTGGCCCAGACGGTGGCCAACTTC
AACATCACCAGTAGCACCTGTGAGCTCAGTAAGCAACTCAACATCGCCTACGACGTCACCTACAGCCTGGCCTGCGTCCGCTGCTGCGTCAACCCTT
TCTTGTACGCCTTCATCGGCGTCAAGTTCCGCAACGATCTCTTCAAGCTCTTCAAGGACCTGGGCTGCCTCAGCCAGGAGCAGCTCCGGCAGTGGTC
TTCCTGTCGGCACATCCGGCGCTCCTCCATGAGTGTGGAGGCCGAGACCACCACCACCTTCTCCCCATAG

[0295] TABLE V

MOUSE NOMENCLATURE
ICSGNM Ccnd1
Celera mCG21251
HUMAN NOMENCLATURE
HGNC CCND1
Celera hCG27985
MOUSE SEQUENCE - GENOMIC
CACGGGATCCAAAACCCTCTCCTGACTTCTGCAAGCGCTGCACACACATGGTACATAGACATGCACACGCACGTGCGTAAACATGCTGGCTTTCTGA
TCCTACGGCTTCTAATTTAGCACTAACACTTAGACTTTTTATTCCCTGTTGCTGCCATGACTGACCCCAGACCCTGCCTTTCAGGCTTCTCCTTGCT
TTTCAGACATGGGACAGTTCTGGGGTCTCTTTTGCAAATTGAGACCTGTGCTCACCTAGCACACATGTGGCCTTGGGTTCCATCCCCAGAACTGAGT
GAATGAGGCATGGTGGCTCACCCTGTGATTCCAATATTCAGAATGTGGAGACAGTAGAATGAAGAGTTCCAGTTTCAGGTACACCAAACCTTGTACC
AGAAAGAAGAGGGGGAAGAGAAGGAAGAGGAGGGAGAAATCTAGCAAAAGATGGAGGAAGCATACAGTGACTTTGAAGATGTGTTAACTTTCCCTTG
CTGTAAGGAAATACCTGCGGTAATTAACTTATAAAGAACAGAGGTTATGTGAACTCACAGTTTGGGGATTTTAGTCCAGAACAGGACTCTATTCTAC
TTCGAGTCTCTAATGCAGATGATGAGAGCGAAATGCTGAGCAAACAGAACTGAACTGCCCTGTACTACATGGCAAATCAGAGGAAGAGTAGTCCCAT
CGTCCTCTCTGAGGCCACCTTCAGTAACCTAAGGACTGCCAGGCTGTGCTGTTTGTTTGTTCTCTGTCTCTAGGGTGTTTGTTTTCGGGTTTGTTTT
GGTTTTGTTGGTGGTAGGTTTTGTTCATTTGCTTGTTTGTTTTTGATATAGAATCATGCTATGCAGCCCAGGCTGTTCTCAAACTTGTAATCCTCCT
GTCTTCGCCCCCTGACTACTAGGATCACAGTATGCGCCACCACACCTGGCTCTAGAATCCATCTCTTGGAAGTTCTACCACCTCCCAATAAAGCCAC
CCTGAGAATGAAGCCTTGGACAACCAGAGAATATTGCTGAGCCAAACTACAGCAAGAAGGCTGACCAGAAGGCTCTGCCAAATTCACAAGCCACTGG
CCCATCTGCAATAGATGCCATCTGTAAAGGAGTCACTTCTCCCCAGGGTGACAGATTCAATGCAACCTCAATCAAAACCCTAGCTGTGGTGGGTTTG
TGTGTGTGTGTGTGTCTGTGTGTGTTTATGTGTGTGTCTCTCTATGCATATCTGTGTGTGTGTTGGGGGTGCTAACCTGTGTCTGTGCATGCATGCA
CAGTGTCTGAGAAAGAGGGTCCAAGATGCCGGCCACTGTAGGCCATGTTACTGTTCGCATGGGACAGGCCTTAAAGAAGAGCTGCAAAAGAGCCTTG
TACCCACCTCCTCCAATGAGACCCACCCCAGTCTGCTTTCTCAGTTAATCTCTTCCTCTCTCAACTTGAAGCCTGTCTGGGAATTTGCTGTTGAGTA
GATTATAGGCTTGGCCTCAGCTGGTCCACTAAAAGCAGGAGGTGAGGGCCCAGGCCTGAGGAAGCATTGGGGAGGCAGATCCCAGGCCTAAGTTTGT
TGGAGACACATTCTCCAGGACCACAAATAGCTGACATGCTGTTACCAGATTGTCATCCCAGTACCTGCAAAGTGGGAGAACCAGAATCAGGTGTTCA
AGGCCAGCCTCTCAAAAAACAAAACTGAAGTAAGTACATCAACTCTACTCTGCCTTTTAAGAGTTAAAAAGGGGCCTGGAGAGATGACTCAGCAGTT
AAGAGCACTGGCTGTTCATCCAGAAGAACCTAGGCTCAATTCCCAGCACCCATATGGCAGCTCACAACTGTCCATGACTTCAGTTCCATAATTCCAG
GGGATTTGTCATGTTCACACAAACATACATGCAGGCAAAACAGCAATGCACATAAAAAAAAATAAATCATAAAACAAACAACAAAGAGTTAAAAGGA
CAGGAGAAGAGGAACAAGAGAAGGTTCATGTGGCCAGGTTTTCTTTTCCCCAATTTAAAAGTTTCTTCTGAGGTTTACATCTCACACCCATAAAGAG
CTCAGAAGTCAACAAAGCGAGGAGGCTTGATTCATCATGAAGTCATTTCAAAATTTCTCTTTCTGAATATAAACCAAAATATTTAATTAATTCCACA
TACCACAGGAAGTACATTACAGCCTTCAAATTCACTCTGCTTAACAGTAAACTCGTGAACGAATGCACAGAACAGACCCCAGTCACCCACCAGCACT
ATGCTAAATGTCCTATGCACATTACCTGAATTACTTCTGGCCATGGCCTGGCAGAGGAAATCATCCCACTGCCCAGCAGAGATGAGGGCATCTTTGC
CCACAGCCTCTCCAATGCCAGAGAGCACAGCTCTGTACGTTGCCTCCTGTAGTTACAGAAATGTTTTCCAACTTCCTGGCATCCTGAAAAGAAGTGG
CTTGCCTTAAAGTGACTTTTCTTTTTCCTTTTCACAAACAGTGCAGGATGGCCTCCTGTGCCAATGACAGGTATGTGCTACCTCATCTAGTTCTGGT
AGTACGTGGATTTTCTCTCTCTCTCTCTCTCTCTCTCTCTCTCTCTCTCTGTGTGTGTGTGTGTGAGAGAGAGAGAGAGAGAGAGAGAGAGAGAAAG
AGAGAGAGTGAGAGAGAGAGTGTTTGTGTACCTGTTCTTTCTTGTGTATGTGTGTACCTGCTCTTTCTTGTGTGCACATATGTGCACCTGTTCTTTC
CTCTGTGTGTATGTATCAGCTCTTTCTTGGGGGGGGGTGTATGTCCCCCTGCTTCTGCCTTACAAGGGCTAGTATCTCAAGCAATGAGTTGGTGGAG
TTACAGATGCCTGTGTCCAGCTCTCTATGGATTGTTAAGCTGCTAACCTCAGCACACTGGTTTTCTGCCCTGTCAAATGCCTGCGATGACAGCATCC
ACCTGGTAAGCTGGAAGGTGGGGTCTGCTCCTCCATCCCACCTGAGAGGGAATGATTTCCTTAGATAGGCTGCGGCTGGAACTCACCTGATCTAGAA
GTACACTGGGGGCACACAGGAGCCATGGAGCCCCTAAGGCCCACCAGCAGCTTCTGTCCTATCCCTTCTGGCAAAGGGGCCATCTGTCAAAGGAGGG
GTTGAAAGATGGCCCAGAAGAGGTCTCCTCAAATCTCTGACCCTTACAGGACTCTGATGATAAATGATACAGTCTCAGTAGGCCTATCCTGGCTTCA
TTTCTTCTGCTGTGATAAAATGTCATTGGGGGAAAAAAAAAAAAGCAGCTTAGGGAGAAAGGGCTTATTCTGGCTCGGAACTCCAGGTTTCCAGTCC
ATTACTACATGAAAGGCAGTGTGGCAGGAACTTGAAGCACATGGTCACATCATATCCTCCCAGAGCAGTGAGATATGAATCCAGGGGTGGGGACTGG
AATGATGGCTCAGGGGTTAAGAGCATCGGCTACTCTTCCAGAGGATGCCGATTAAAACTGTCTGTAACTCCAGTTCCAGGGGATCTGACACCCTCAC
GCAGACATACTTCAAATAGACATACATGTGGGCAAACACCAATGTACTTAAAATAAAAATAAATAAATTATAATAAATAAATAGGTGCTTAGTTACT
TTTCCCACCTTTAATCAGTCCAAGACCCAAGCCTAGGGAATGTGTCACCCACTCCCACACTGGGTCCTCTCACATCAGCTAAGATAGCCAAGACACT
ACCCACAGCCGTACCCATAGGGCTTCTTGAGACTCTCTAGCAACGTGAATCGAGGTTGTGTCAAGTTGACAATTGAAACTATTATGGTGCTTAACTG
CTCCCTGATGAACAGGATGTGGCAGAGACAGGCATCCCATTGGTTAATGTCAGAAGTGTCATCCCTCCGTGGACTGAATTTTTGCCTTTAACTTATA
TTTATTTGCTTGTTTGTTTATTAGTGTTTGTATCTATGTGCATGTGTGAGTGCGGCTTCCCTCAGAGTCCAGAAGAATGTGTAGAATCCCTCTAGAG
CTGGAGTAGGGGGCTGCCGGGTATGGGTGCTGGAAATCAAACCCGGTCCTCTGGAAAAATCAGCAAGCACTCTGACCTGTTAAATCATCTACCTAAC
CTCATCCTTGCTCATGTTTTAAAAATAGTTATAGTGGCCAGGTGGTGGTGGCGCTCGCCTTTAATCCCAGCACTTGGGAGGCATTGGCAGGAGGATT
TCTGAGTTCGAGGTCAGCCAAAGTGAGTTCCAAGACAGCCAGCAGGGCTATACAGAGAAACCCTGTCTCAAAGAACCAAAAATAAATGAAATAATTA
TAGTGGGTTTTTGGACATTCTCTGTATGCTAAGCACCTTCCAGATGGGCTTCCTGACAAGAGATCCGTGGCCTGACCCACACTGATTTGAAATAATG
ATGAAAATTCAACTTTCAGAAGCAAAGGCTGTAGTTCCTCTCTGGCTTCTACCACAGTCAGTAACCAGTCCAGTTCCTTAGAGAGTCAGTCACCTTA
GTACACATTCCAGCGGAGCCAAGACAGTATAGTGCTCCTTATAAACATGGAAGGGCAGTTCCTACCCAGCGAGTCACTGCGGGCTTGGTGCCTCTAC
TGAAGCGCAGGCTCAACCACCGTTCACCGCGGGGAGCGTCCTCAGGCTCTCGCGAGCCACTGCTGCGCGTCGCGTCCAAGGTTTACGGTAAGCGCGG
CGCTCAGGACGACCACGTGGCGGCGAAACACCGGCCGGCGGGAATGCGCGGAATGCGCGGTGCGGCCTCGCGCGCTCCCCAAGCCGTGACCCCGGAG
TTCCCGGCGCGCGTTTGTGGGACCGCGGAGGCTAGTGCCATGGGTCCGCCCGCGCGTCCAAGCCACCAAGCACCACAGGGAGCAGGGGCCCCATGGA
GGGCTCAGCACGTGAGGCTAGACAACCTTTTCCAAAACCTGGGGCTAGGTTTGCCCTCCCTGTTTGGGCTCCATCACAGATCTGGAACCCGCTTAGT
CCCCATTCTAAAGCCCCCACTGATCTGGATTAAGAATGGAGATGCCTGGTTTTGCAGGGAAGCAGGTCAAAGGGCTCTGCGCCCTGACCGCCCTTCG
GAGTGCTGAGGGACCAGTGCCAGGGGCTGAAAGACCCCAGTTCCAGCAGCTGCGCCCTGGGATCGCATGAGGGTTCGCTCACCACGATTGAGCCACG
TGGTCCTGCCTGGCCACTGGTGGCTCACCTTGGCCCGAGTGCCCGCTCCCCACCATTTAGTCTGGGAAGGGCCGAGGGCCAAAGCCCAAAAGGACCC
TAGGGTTCTTCAGAGCACCTGTGATTCGTTCAGAGAGCTGGAGACCGAGCAGACATCCCTCCTTCAAATTGCATCTCTACCCTTGGGGGTCCCTGGA
GCCAGGCTTGCCGCTCCAGAGCTCATTGCACGGCGCGCGTCTATTCGCTCTGGGTGGTGGGATTTAGGGACTGAAACTTATTTGGTAAGGCACGCTT
GGGAAGATAGGATGCGACGGTCCCAGGTGTGCACAGGGGATGAGCTGAGCATACACACCTTAGCCGAAGGGTGCCTGAAATCCGCTCAGGGTAACCT
AGGCGGAGCAGCCGTGTAGCACGTGGGCTGCCACGCGCGCCCCAAAACGCCTTCTGGGTGAGGAGAGGGAAGCCGTAATGCCTCCGGAACCTTGGGG
TCCATATTCGGAAGTGTTTTCTCTGGGCGACTTGAAGGCTAAATTAACAATGGCTAGCTGGAGCAGAAACAGCCAAGTCCTTTCAAGTTGCCGCCAG
GTATGCGGCTGCAGGTGACCCCACCTAGGTGCGTCCGCTCTTCTCCAGGAGGGGCTACAGCCAGAGGCTCAGTATTGCCGCCCAGCCCCGCACCCCT
AACCCGAGCCCCGCGCTTAGTCGCGAGGGTTCCTCAATGAACGCGCTCCCTCCCACTTCTCAATGAAGTTCCCACAGCCAGGGATAGTGGCAAACGC
AAGACTAAATCTCCGCTCTCTTTGGAACCTTGGCTCCAGTCAGGTGGGGGTAGGGGTAGGGTTCGAGGAGGCAGGAAATCCGAAAGGGGATTAAAGT
TACTTTGAGATTTTCTTTCCAAATAACGTGGTTCCCTCTCGGCTGGGCAAGTGGCCTTTTGTCTCCAAAAGGTCACTGACAAATAAGCGCAGAACAC
TTTAAGCCCAGAGCGGACAGTTCCTGCCACGAGATTTTTTTTAAAGCCAATGTAAAGTTAAAATTGCAAAAGAAAGTGGGTGTTTGTGTTTAAGTTA
CTATTTCGCTGGAAAATAAAAATCCAAGTTCTTTCTCTGAGATTCCTAAAGCAGTTGTCCCGGAAAGAACTCTGAATTGCAGCCCACCTCCTGGGCT
CGGGATTCGGACAAGCAGGGTTTCCAGGATGGAGGATGGGCGCTCCCCGCCGGGTCCCAAATTCCTGCGCCTCCCCTACGGGTTCCTGGACGGCTCT
ACACGCCCGCCAACCGGACTTGCACTTTTGCTCCTCTCCCTGAGCGCAGAGCTCAACGAAGTTCCTCGTGGAGATCTGCCCGGTCCGCCTAGTAACA
GCACTGAGTCCGGATTGGCTCATGCAAATTTCAGTTTCCTGGTCTTTCCCGCGGTGGCGGTGGTGGGGGGTGGCTGCGGGTCGCTAGCTCGTGCTGC
AGGGTGGGCGAGCCCCTTTATGCCCCGCTGCCCTTGGTGGCGCACCCTGGCTAGGCTAGCCTGCTCAGTTCGCAGGCACTCAGCCGCGGGTGATAGC
GCGCAGCCCTATAAATCATGCTTACTGCCGCCCGGTAGGGATTTTATGAATGAAAAGGCAGCCTGGCCGCCCTCGTGCTTAGGCTAAGGCTCCCAGG
CTTGGCGGGGCCTGTGGCCAGAGCAAGCGTGGGCACTCTGCCCGGGCCACCCACCACCTTCGGAGCTACAGTGGAATCACTGTCCCGAAGGGTCCGG
ACTTTAGGGACCCCAATGTCGGGGGAGGGGGAGCGGAAGGCATGAGCTCGGAAGGTGAGGGGTTTGCGTCTTGTGTGCCGCCTGGACGCCGTGCGCT
CCTTTACCAGTTTCTTCTGGGACACGAAAGTATTCCGTGGGAAATGTGTGTGAATAGTTCGCCTAGCTTGAAGTCGGGTATTGTGAAAACGTTTCCA
AAACTAGGGAACTAAATAATGGACGAAGGTGGTGGAACCGCTTTATTCTAAAAATATTTTATTTGAATCTATAAATTATAAACTTAGGAGTCCATTC
AGTTAACCACGACCATCTATAGATTCTCTTTAAATATCACCTTATCGGCTCACAAGTTTATCTTGATTCTCACCAGCCGCCCCCCCCCCCCAACTCA
AGACTGCAATTCTAAAGGTGGAGAAACACCACCACCCTCAACGAAGCCAATCAAGAAGCTTCCGGTGGTCTGGTTCCTGGAAGGGCGACTAATAACT
TGCAGCGATTTACTTTTCTTAATTAAAAAATAAATTAGGAAGGAGCCTATCGTGTCTCAACCTTTTCTTCAACGGTTTATTTTTCTTGGGCAAACCG
CGTGCAGTGGAGGAGGGGGATACTGGGGGACCCTGGCCAGGATAAACCGGTCACTGTATGAAGACAAATCTCAGATCCCACCCCACCCCCCAGCGAG
GAGGAATAGATGAAATAATGGCCACCATCTTGAGCTGTTGCTGGAATTTTCGGGGTTTTATTTTATTTTTGAGCGAGCGCATGCTAGGCTGGGGATC
CTTTAAAGTTCAGATACCCCTCTGGCCCTTTGCAACCACCCCAGTGCGCCAGGATGGAGCCTGCACGAGAGCTTAGGGCTCGTCTGGCATCTTCGGG
TGTTACACAGTTCCTGAATTTTACACGTGTTGATGAAATTGAAAGAAGACAGGGACGCTGGGATTTCTAAGCAATGGGTCCGCCTGTGGGTGCCTCG
TGGCGTCCTCGGAAACGCACCCATTCTCCCGGTTTAAGAACAGGGTGTCCTTGCACCCCCAGGCTCCCCTTCCATACATTCTTCCTTGGCTTGCGTG
TGGCCTGGCCTCCCTCCTAGCTGTCCTCCTGTCCAGAGCCGCCACTACCCCACCTCCACAGGTCTCGGAGGACCCTCTTAGGGAAAGAAGCCCCCCT
CCCCCTTGCCCCGCTCTTTCCCAGTTTGGAGAGAAGCAGTCCGAGCGATTTGCATATCTACGAAGGCTGAGGGGGAAGGGNNNNNNNNNNNNNNNNN
NNNNNNNNNNNNNNNNNNNNNNNNNNNNNNNNNNNNNNNNNNNNNNNNNNNNNNNNNNNNNNNNNNNNNNNNNNNNNNNNNNNNNNNNNNNNNNNNN
NNNNNNNNNNNNNNNNNNNNNNNNNNNNNNNNNNNNNNNNNNNNNNNNNNNNNNNNNNNNNNNNNNNNNNNNNNNNNNNNNNNNNNNNNNNNNNNNN
NNNNNNNNNNNNNNNNNNNNNNNNNNNNNNNNNNNNNNNNNNNNNNNNNNNNNNNNNNNNNNNNNNNNNNNNNNNNNNNNNNNNNNNNNNNNNNNNN
NNNNNNNNNNNNNNNNNNNNNNNNNNNNNNNNNNNNNNNNNNNNNNNNNNNNNNNNNNNNNNNNNNNNNNNNNNNNNNNNNNNNNNNNNNNNNNNNN
NNNNNNNNNNNNNNNNNNNNNNNNNNNNNNNNNNNNNNNNNNNNNNNNNNNNNNNNNNNNNNNNNNNNNNNNNNNNNNNNNNNNNNNNNNNNNNNNN
NNNNNNNNNNNNNNNNNNNNNNNNNNNNNNNNNNNNNNNNNNNNNNNNNNNNNNNNNNNNNNNNNNNNNNNNNNNNNNNNNNNNNNNNNNNNNNNNN
NNNNNNNNNNNNNNNNNNNNNNNNNNNNNNNNNNNNNNNNNNNNNNNNNNNNNNNNNNNNNNNNNNNNNNNNNNNNNNNNNNNNNNNNNNNNNNNNN
NNNNNNNNNNNNNNNNNNNNNNNNNNNNNNNNNNNNNNNNNNNNNNNNNNNNNNNNNNNNNNNNNNNNNNNNNNNNNNNNNNNNNNNNNNNNNNNNN
NNNNNNNNNNNNNNNNNNNNNNNNNNNNNNNNNNNNNNNCTTTATTGCAAAGCAAAAAGTGTTTATTAATAATTGGGGGCAGGGCAGGGAGCGGCAG
TAGGGGCGCTGGGACAGGCACGAGGGGCCTCGTGGCGGCCGGGAATCACTAAATAAGACAGTGTGAGGAATATTTGGGGTGGGGGATTCTTTGTTCA
AACAGCGGACCTGGGTACCCCGCACACGCTGCCTGGCCCAGAGAAAACGCCAGGCTGCAAGGTCGCGTGGCCCCCTAGTCAATGAGACTGACTGTTG
TGCGTGCGGTTCTGGATTTGGAGGAACCTGTCTAGGTCAAACTGGGGGCGGAGGGGGACAAAAGCACATTTTCAGATGTTCAGCAGGAGACTCAGGG
GTCCCAAAATATTTTAAAATAATTTTTAAAGTGAGGCATAATGCCCTTGTAGAGGCAAACAGCGCCCGCACCCTGCAAAAGGGGGGCCCCCCGGAGT
TTGAGTTGCTGGAGCTCACCCCCCAATGTCCACTGAGCTCCTGACCCTCGGCTTGGATCAAGGGTCGTCCGATGGTTATTTTCAGGTCGTTTTTAGG
CACCTAGTTATTTTTTAAATATTTTTAAATATTTTTTGAAAAGATGACGTCTGGGAAATGCAGCGCGGCGGCCTGGGACGCCACCATTGTGTCTCGC
GTGCGCTCGAGCGGCGCCCAGCCCCCGGCGCCCCGCCAGCCCCGCGGTGGGGTTCTCTGGCTTGTGGCTTCCTAATTTCAACAGGGGACCGGGGTCT
CCGTGGCCACCATTGCTTCTACCGGCCCCGCCAGCTGCCCAAAGACTTTCCCTTTCAGTTTCAGGGTGGGTGGGCACTGGGAACCCTCGGAGCAGGA
GCGCATCCCAGGGAGTTGGCCACCGGAATCCCTCTCTGTGCAATCTAGGAAAAGGGAATGGGGTCGTATCGAGCGACGCCCCCCTCCCACGTTGACG
GTCAGGGTCCGGATCCCCGCAGGTCTGTGAGGAGCAGAAGTGCGAAGAGGAGGTCTTCCCGCTGGCCATGAACTACCTGGACCGCTTCCTGTCCCTG
GAGCCCCTGAAGAAGAGCCGCCTGCAGCTGCTGGGGGCCACCTGCATGTTCGTGGCCTCTAAGATGAAGGAGACCATTCCCTTGACTGCCGAGAAGT
TGTGCATCTACACTGACAACTCTATCCGGCCCGAGGAGCTGCTGGTAACCACGTAACCCACCACCGACAATCCCTCTTTATGCTGGGTGGTGGGAGC
TGCAAATGGCAGGAGATCCAGCCATCCATGGACAGATCTCCTGCCCCACGAAAGGCACCCGCACCGCACCGCACGACACCGAAATGGCAGTGAGCAG
AATGCCAACCCATTCTACCTCTGTGCCCGCCCTCTTTCCGTACTGGACTCCCCACCATGTCTGTGGTGAAACCACTCTGAAATGTGGGCGGTGTGCG
CCCCCTAGCGACGTGCAGGCCACGGCGCTGGCGGTGGGAGATTCTTTTTGTCCGCAGTCTGTCCCCTTAGTATTTCTACAGGCACATTTTGTTGTTT
ACCTGTATGGGGTCCCGGGTTGACCCAACTCTTTAGACCTTCTCGAATCAGCCTGCCTTCCTTTTGACCGTGTTCCTCATTCTCTGCAGCAAATGGA
ACTGCTTCTGGTGAACAAGCTCAAGTGGAACCTGGCCGCCATGACTCCCCACGATTTCATCGAACACTTCCTCTCCAAAATGCCAGAGGCGGATGAG
AACAAGCAGACCATCCGCAAGCATGCACAGACCTTTGTGGCCCTCTGTGCCACAGGTAAGGCTCCACCCCCATTCTTCCCAGGAAGAGCGGGCTCCT
TGCCACTCCCCCTGGGGTTAAGGCCTCTTTCCTTGCTATCTATTCTGAGCCCAGGGTGCAGATAGTTTGTTGGAGAGATAGATGATACTGGGTGGCA
CATTCTCTTGGCTAGTATCTTGGAGACCTAACAGAATGACACAGCTTCCCTGTGCCAACCTTTCCACTGCCAGGAAGTGGTACGGCCACAGCATGCT
TTCTGAAGAGGTTTTTGCCTCTTTTCCTAGGCTTCCTGCCTTGCCTCTGTTCTTAAGGAGCTCGAGCTATAGAGCACACACACACACACCAGCTTCT
CCCAGGCTGAGCCACCTGCTAGGGGTTCCTACATGGATGGGACAAATGGTCCAGCCTCAGCCCCACGAGCTACATACAGTACAGCCCCAGAGCAGGA
ACTTAAGAGGCCCCACCAGGGGTACTGCAGGCCAGTACTTTTTGGCTGAGTCCTGCCTGGGAGGGTTGGCTGGAAACAGAGAAACTAGAACCTCCCT
ATGACTCCTCCAAGGGACCCTCTCTGGCCCCAGACCCCAGGTAGATTAGGCTGACATAAGTCATGGTAGACAGCCATGCAGGAACCCACACACATAG
ACAACCCTGCTACTTCTGAGTGGTTTCAGTACTACTTCTGACAGCTGCTCCTCACCTCTAACTGAGAACCCTACCCAGGAGGCTTAGCAATATTGAG
GGGGTGTGGTGTTCTCCCACCTGTTGAGGACCCCCTTCCTCTGTGGCCCTGATCAGACCTCAGTTGCTATAGCTGTTTGGCCTGTGATGTCAGAAGG
GCCGGTAGAGTATCTCCCCCCACCCCCAACCTCCACCTCACCCCCGCTGTCTCAGTGACATCTTCTTATGTCTGACAGCCCCATAGCCAGTGTTTCT
AAGCTGCTGGTGTGAGAATTTGGAAATTCTAGCTTGCCAACTACCTACTGAGAGTGCTGAGCCCGCCCCAAGGGTACCAAACAAGGGGGTGGCAGAT
GGGAGTAGCAAGGCCATCGGTAGGCTGGAAGGATCTAAGGGGTGGGGGTGGCCCTGCTGGCAGTCAGGGAGGCAGCTGGCTGGGGTTCCTCTGAGGA
GAGCGGAGCCTTTGGAAGCTCCAGGCAGCCTTTTATGGAGCTGAAAGTGCCTTCAGAGAGGCAGCAGAGTTTCCCAGAGATAACTTGGGGATGGAGA
GGCACAACCTCCCCCAGGATAGTTCTGGCAGTAGTGTGCCCCTCCCGGGACCCCTAGATGCCAGCAGAGTAATCAGTAAGCGCTATATCTGGGTACA
GCTGGACTCAGCTCTTCCAGCTCTCCTTACTGCCTTTGTCTGTGCCCCTGGAATACAGGTGGGGGTAAAGGACAGCTTGGTGACCTGCGGTAGGCCA
GTGTTCTGTGGTCTGGAGCATTTGTTTCTCTGTAGGAGCAACCAGCTCCTTTGTCACACGGGAACCACTTTGGGAAGAGGCCAGTGTGACATCACCG
TGAATGGAAAGATGCTAACATCAAGGCCAGGAGATCTGTCGTCTGTGTGACAGGGGTTCCCCCTATAGGAGATGGGAAGGCATAACTTCCCTTCTGC
AAACCGCCCCCCCCCCAACCTGGATTCCTGACTGCAGTTGAACAATGTGCTAGCTAGGGTTGGGGTTGTTAACACAGGTGGCCAGAGCGCTGTGTGG
ATGGATACAGACAGTGGGAAACTGAACTTAATGAAGTATGTAGGTGTCAGACATGCCACTAAGCCAGGGTACACCTATGTCATCAGCAACCAGTGTT
AGTAGCTAGGGATCCTTATAGGACATAACAGATCTTGCTACTGCCCGTGGGAGGGAGAAAAACAGGCTCTGGAAGGGGCTGGGGACTCCTGGTCCTG
CTGGCTGGAGTCTCACTCCCTGTAAAAGGGCTGTTTGTGATTTGAACTTGACTCCATAGCCAGGTTTTGGTTCACTGGACTCACTAGCATGAACTGT
CCTTGGTGACACCTGGAGGTATTGCTTGTCTGCTGGATCCCTTTAACAGCCAAAGCTGTATGTTCTCTCAGGGTGGTCCCCAGAGGGCCACCTCGCT
ACAGCAACTCTCTGCCTTCCTGATCCCATTCCTTCCAGCCTCCTTGATCCCAGGCTCTGGGTGACACACAAGATGATTGATGGGAGCTGACATCTGT
TCATTCTTGTGTCCTCCTCTGGCCTGGAAGCCCTGATTCGCAGGCCAAGTGACCAGCTGTCCCTGTCACTATTTCTTTGTTGGACGTGACAGGGAAG
CAGTTTTCAGACTCATCTTTGGTGGGTTTATGCGGAGAGGCATTCCATCGGTGTGACATACAACTGCAGGATGCTGAGTCCAGTGGACCTGAGAGGT
GTGGAGTTGGTGACCCCAGATGAAGTCCTAAAATGACACCCCACTACTTCCCAGTTGGGACATGTACATATGAGAGTCCCTAAGACTCCAGGGCCCC
TCATGAGGGACCTTGGCCTGGAGATCTGAGGTGGCTATTCCCAGCTCCCTCTGAGTCTATTCCTACTGGGTTTTCCTGGACTGGGGTCACATGTCTT
CCCCAACCTGGGTCAGTAAGCCGGGAAGGCTAACTCCCTTCTGTGGAGTCTAGCCTGGCCTCTGAGGAACCTGGGCCTGTCATCTCTACAGCTTTCT
CCTGTGTCTGAGATGTGTCTCTAGTCCTTGGGGTGCTGCCAGGCTGACTCTGGAAGAGACAGAGATCCCTGCCTCCCACCTCAGCCGCGCAAATACT
GGGATGCAGATGTGAAAGCACCACACCTTCATAGATTCCATCCTCTTAGGGCGACATAGCCAACCCCTCCTTGATGTTTGCTGGAAGTGCTGGGGAT
TGAACCCGGTGTGTATGCCAGGCAGCATTTTAAAGTTTGAGCCAAGGCCTTATTGACAGGTAGCATCAAGGCTCTGGCCTGGACACCGTAATCCTCC
GATGTGCTGGGGTCTAGAGATGCAGCACTGTGTGCACCTAGTGCCACTTAGGTGTCTCCAAGGGAGCTAGAGTTGATGTGGGCATCCATTGGAAGGG
CTTGAAGACCAGCCCCGAGGCTGTGGGTGGGAGCTGAATCATAGGCATGTCTCTGTCCCTCTCGCTGTAGATGTGAAGTTCATTTCCAACCCACCCT
CCATGGTAGCTGCTGGGAGCGTGGTGGCTGCGATGCAAGGCCTGAACCTGGGCAGCCCCAACAACTTCCTCTCCTGCTACCGCACAACGCACTTTCT
TTCCAGAGTCATCAAGTGTGACCCGGTGAGTAAGTCTCATCAAAGGAGGCTACAGCTGGCAAGGGCCTGGGAACCTTGGTGGGCAGTGCCAAGGCAC
TGTGTGACTGGGCTGGAGCTGAGAGGTGCCAAATCTGGGTCCCCACGAGCCTCTTCCCAGAGTCATGGGTCCCAAAGGCATAGAGGGCTGTGGTGTG
GTGACAGTGCCCCTGCAATGTGTATGGGTAGTGGCATGTGAAGCCCGGTCTGGCCCAGCCAGCATAGGACCATATCTCCCTCAGTGCAGACGTTGGG
GATTGAATCCATAAAGGACTCTGGTATAGACCTACACATTCTAGAACTTTCTTTGTGTGAGAGAGGGGTTTGCATCAGGCAGACTGTGCTACGTCTA
ACTGTACCTTTCTGCCAAGGAGTACAGCTGATCATGCTTGGGGCTCTGGCCGTGAATGTTTTCTCAAGGGCATCACAAGTTGGCATAGACAGGCAAA
AGTCCAGTTCTGGCTTGAACTTCAGTTGGGGGTTCAATGGAGGTCAGAGCCACTGGCATGTGGAAGGCTTCCAGGTGTGACAGCTGTTCTGCCCTGC
CTGGCATCAGCCACAGGGACACCCCGTGCCCCATTCCTACATATCTCAATTGTAGAACATGCAGCCCCCTTCCCCTAAGTGTCTGGGGCTCCTGAGA
ACTGAGAATAGGGTATGTGGGCAGGTTGGAGCCCACAGGCTTCAGAGAGGGAAGGGTGTCTGTGGGTCCATACTAGGCTACTTGGGCCTCACTTTCT
CCATCTGTGAAATGGGGCCATTGCCCTTCCATCCTCTAGCCATGGTGTTCATCAAACAAAGGGGGAACAATACACAAGTTTTGAATGTGGGGGCTTC
CCAGGTGTTCCCCAGGAATCCTCCTGGCTTCAGGAATATAGACAGTGCCCTAGCTTCAGCCTGCCTAGGCAGGGCTTCAGTTCATGAGTCTTATTCC
TGGGCAAATGCTTTCCAGACCCTACCTGTGCTGGAGCTGTCCTCTCTCAGAGGCCACCCAAGGCAAAAAGTTATGAGAGATAGACGCTCCTTGTGGG
GAAGTTCAGGGTACAGCCTGGGAGGAGGAACCTAGAGAGTAGCAGTACCTTTCTAGTCTCTGGCAGCTCTCACCGGATTTAGGGGTGGCTTGGGGAG
TTTCCTCAAGCCTTGCTCTTAGCAAAGCCTGCCTCGCAGGTCAAGGCCCTGGCCACCGGCCTCTGGCTAAACAAGGACCCCCTCCATCTCCGCCCGC
CTCTCCAGGACTGCCTCCGTGCCTGCCAGGAACAGATTGAAGCCCTTCTGGAGTCAAGCCTGCGCCAGGCCCAGCAGAACGTCGACCCCAAGGCCAC
TGAGGAGGAGGGGGAAGTGGAGGAAGAGGCTGGTCTGGCCTGCACGCCCACCGACGTGCGAGATGTGGACATCTGAGGGCCACCGGGCAGGCGGGAG
CCACCAAGTAGTGGCACCCGCAAAGAGGAAGGAGCCAGCCCGGGTGCTCCTGACGACGTCCCCCTTGGGGACATGTTGTTACCAGAAGAGGAAGTTT
TGTTCTCTTTGTTGGTTGTTTTTCCTTAATCTTTCTCCTTTCTATCTGATTTAAGCAAAAGAGAAAAAAATATCTGAAAGCTGTCTTAAAGAGAGAG
AGAGAGAGAGATAGAATCTGCATCACCCTGAGAGTAGGGAGCCAGGGGGTGCTACAAAAATAGAATTCTGTACCCCAGTAATCAACTAGTTTTCTAT
TAATGTGCTTGTCTGTTCTAAGAGTAGGATTAACACAGGGGAAGTCTTGAGAAGGAGTTTTGATTCTTTTATATGTTTTAAAAAAAAAAGCTTAAGA
AACATTGCTTTAAAAAGGAAGGAAAAAAAATACAGCAAACCATTGTTAAAGTAGAAGAGTTTTTAGGTTGAGAAATGTACTCTGCTTTGCTGAAAAG
CCACAGCTTAGGCCCTCAGCCTCACTCCCTGGCTTGCTCAGTGCCTACAGCCCTGTTACCTGATACCTGTGCTTTATCCCAGGGGTGGGCAGACCTC
TTAACCTTATAGATGGTCAGTGCGACCTCTAGTGGTCTCATGGCGTGTGGCACAACCCCCCTCCCCAGGGCTCAGCTTAATGTGCCCTCTCCCCCCA
ACAACCTGCAGGTTCACAGCGCCAGCCACACAGCGGTAGGGATGAAATAGTGACATAATATATTCTATTTTTGTAACCTTCCTATTTTGTAGCTCTG
TTTAGAGAGATGCTGGTTTTTGCCTGAAGGCCCTGCAGCCTGCCCACATCAGGTTAAACCCACAGCTTTTGTGTGTGGTTTGTTTTGTTGTGTTTTC
TTTCTCTATGTTCCAAAACCATTCCATTTCAAAGCACTTTTGGTCAGCTAGCTGGAGGCAGTGTTGCTGGTGTGTGTTGGGGGGAGGGGTTCTAATG
GAATGGATGGGGATGTCCACACACGCATTCAGATGGCTGTACAACAGGTTGTAGGGCTGGTAGTATGAGGTGCTTGGGAAGTTTTGTTGGGTCAAGA
AGAGAGAACTCTGTTCTCGCACCACCGGGATCTGTCCTGCAAAGTTGAAGGGATCCTTTGGTGCCAGCTGGTGTTTGGAAGTAGGAACCATGATGGC
ATTACCTGGACAAGGAGATTGGGGACAACTCTTAAGTCTCACACAGGAGGCTTTTAAACACTAAAATGTCTAATTTATACTTAAGGCTACAGAAGAG
TATTTATGGGAAAGGCTGCCCATGACCAGTGTGACTCAAAGCAATGTGATCTCCCTTGATTCAAACGCACACCTCTGCCCTGCTGGAGAAGGTTTAG
GGCCATGTCTGAGAGATTGGTCTTTTATTGGGCAACGGGGGGGGGGGGGGGGTCCTTAAAAAAAAAAACCACAAAGACAGAGATTTGGTCTGCTTGA
CTTTCCCAACCCAATTGGCCCCATTGGAGAGCCATCCAAACTGAGGAAAATTAGGGGACTCCAAAAGAGTTTGATTCTGGCACATTCTTGCCGCTGC
CCCCAAGTTAACAACAGTAGGTAATTTGCACACCTCTGGCTCTGTGCCTTTCTATTAGGACTTTTTGGCAAAAGGTGGAGAGCGGGAGGCTTAAGAG
GGGATGTGAGGGAAGAGGTGAAGGTGGGACCACATGGGACAGGCCACGGCTCCTCTCATGGCGCTGCTACCGATGACTCCCAGGATCCCAGGCGTTC
AGAACCAGATTCTCATTGCTTTGTATCTTTCACGTTGTTTTCGCTGCTATTGGAGGGTCAGTTTTGTTTTGTTTTGTTTTGCAATGTCAGACTGCCA
TGTTCAAGTTTTAATTTCCTCATAGAGTGTATTTACAGATGCCCTTTTTTGTACTTTTTTTTTTTAATTGTGATCTATTTTGGCTTAATGTGATTAC
CGCTGTATTCCAAAAAAAAAAAAAAAAAAAAAAAAACAGGTTCCTGTTCACAATACCTCATGTATCATCTAGCCATGCACGAGCCTGGCAGGCAGGT
GGGCGGTCTGCCTCCAGGGATCCTGGGACCCTGATGGCGATCGTCCTGTCATGCTGGGCCCTTCATTTGATCTGGGACATAGCATCACAGCAGTCAG
GGCACCTGGATTGTTCTGTTATCGATATTGTTACTTGTAGCGGCCTGTTGTGCATGCCACCATGCTGCTGGCCCGGAGGGATTTGCTCTGAGTCTCC
GGTGCATCATTTAATCTGTTAGGTTCTAGTGTTCCGTCTTGTTTTGTGTTAATTACAGCATTGTGCTAATGTAAAGACTCTGCCTTTGCGAAGCCAG
CTGCAGTGCTGTAGGCCCCCAAGTTCCCTAGCAAGCTGCCAAACCAAAACGGGCACCACCAGCTCAGCTGAGGCATCCCAGCCAGGCAGGACCCTTG
AGGGCCGCTGTGTCCATGGTGATGGGGTGAGGTTTTGGCCAAAAGGCCAAAGACTGGTGGTGGGTCCACGGAATCTGCCCTGTGACATGAAAGGCTT
TGAGGGACTCTGGCTGGTGGCCAGGTTGGCTTTTTGTATTTCTGGTTGACACACCATGGCGCTTCCCAGCACAGACATGTGACCAGCATGGTCCAGG
AAAAAAAAAAGACAAAAAATCTAGAAAATAAAATTGGTAAAATCTCAGCTCACTGTTGTCTGTGTTTTCTGGGAACAGGAGTGGGGTGATGCCACAG
CCATGTGGGGTGGCATCTCTGGCCCTGGCACCAACCTGGGATTCCCAAGGGGAAGGGTGTATGCAAGTGACAGCCAAGAGCAAAGTGGGAGCCTCTG
GCGTCAGGGAGGCCAGCGACAGCCACTGATCAGAAGCGGCTCTGGGTCCATCACTGCCAGCTCACCCTCCTGCTTATTTGCAGATGGAAGATCAACA
GAACCCGCGTTCACTGCCCCTTGTCTGGCGCAAATGGGTGTTTGCTCTGGGTGAATCACCGTTTCTTAGGTGCTGCCAAGCGCCCAGAGAGCCATGC
TTAGTGTTAGGGCCAAGACCCAAGGTGGCCTTTCACATAGTTCTGCAGACCTGAGTGGCCTGGCAAGACTCCTGTGATGTCTTCGGGGTGGCAGTTA
CTCATGACTAGTATTGTTTCCAAACCCTGTGGGGACAGGTGGCTTTTAGACATCATCTTCTACAAGGTAGCTTTTGGGTCTCAGCTTGGCTGTTTTG
GTGCCTGGTGGGCCCCTGCCCTTCTGGAAAGTGGAGGGTGTAGAGGACACCTGGTCTGAGTGGTGCCACCCAATGATGAAAGCAGAAAGAGATGGAC
GGAGGGAAGCCCACAGTGACCTTGCCAGGCGACCTACTCAATGAGAGTATATGGGAACACCAGAGCCAGAGGTGGCTTATGAAGACACAGTACTCAT
CTTGTACCAAATTGTCTGATGGCAGGATCCAGAAGGTATTTTGTCAGCCCAGCTCCATATAAGCATCCGAGCCGGGTCCACAGTCACATGGCATCCA
GGAGAATGGGCATGGGGCCGTCAGCATTCCAGGAAATGGCCAAAGGGCATTGAGGTGGAAGAGTGCTTTCCCCCTTGGTTCTTAGAAGCACTGGGGA
GCGAGCTTATCGTGTCCAGGTAGGCTGACATGAGGAAATCCGCTGGGGTGCAGCAGCCAGGCAGCCAGTGCAGCAGAGTGGTACTAGGAATGCAGAC
ACAAATAGCAAGGGGCTAAGCATCCACTCAAAGGCTGCTGCTGCTGCTGCAGCTGCTGCTTTCCACCACTGCCTATCAAAGGTGCTCATGGAAGGGC
GCCCAACTGGAATGGGCAAGCATCACCATCAACTGCACAGGGCTCACACATGGTGCCGTCTCTTAACGGTGCAATTGGCTTGTCTCGTCATCCAGTG
GTCTGTGATTCCCAGCTGTGGCTGATAGCCAAGCCTCTTTTCTTGGTTTTAGCAGTGAAACCCCAGATACCACTGGCCACTCCAGGCTCCAACCCTC
AAGTTTAACTGGTAACACTGGAGGCTAGATCCTCTGCTGGGTGTAGAGATACTCCTGTTCTAAGGGTGATGGTAAAATAGCTTTTTGAGGGCCCTCA
GAGATAAGGACTCAGGGAGCCAGCACACCCAACTGTCTCCTCTCAGAAGCTCAATGGCTGGTTCTCTCTCTGCCTCTACCAGCTCCATGGTCCCCTG
CCCTGTGTCCTGGCCAGGCTCTCCTTTTGCAGGCGGCCTCCATCCTGCTGAGCCATCCTACCTCTCTCAGCCAAGCCAAGCTCTTGAACCTGCCTGG
CCTCTCTGAGCCTCAGCTCCCTGAACTGGAAAGATTGCCCCTGGCTCCCCATTCTGTGTTGCCCCACTGCCTGGACCTGCTCCAGCCTTCCTGTTTG
TCCTACAGGACTCACAGTGAATGTGGCCCCTGTGGAGCATGTGGAGCATGACATTGCACAGGTGACTCTGTGTAGCCTCTCCCCTCCTGACTCCACA
TCCTAGAACCAAGTGTGAGGAAGTTAGCCTGTTGCCCATGGGTCAGCTCAACTGCTGCACTTTGTCCCAGAAAGCAGGCCAACTTCACCAACCCTAC
AGAGGATCTGGGCTGCTGGGGCCCACAAAATGCCAGCAGTGGGAGCTGAGGACTCCAAGGGGTGGGACACAGGCAGAAGAGTAGGACTGTGTGTTCT
CCCTGCAGTGCCCCAAAGCCCTGGCCACAACATCCCAGGAGACAGTCAATGCGGGTTGGGCTGTGTGTTTGGTGGCAAGGCTATGCAGGCCACATAA
GGCCAGTGCTGGGAGCTGGCACTGCCAAGTGTGCTTGCCAAGCAAACCTGTACTTGAGCTGATAAAGCAGTCTGTTGAGTGTGTGGGGTGGGGTGTA
TAGGTAACATGAGGCGGGCATGTTGTATACAGGGCCCCACGTGGGCACAGCACAGTGCTGGTGGGATGCAGTACCCCTAGTTCTGAGCTGATCTGGC
CTCTCTTACTCAGGGATGTCATCCCAGGAATGTATTTGATCAAACAGTTGTGCAAGAGGACAAAGCAAGCACAGGANNNNNNNNNNNNNNNNNNNNN
NNNNNNNNNNNNNNNNNNNNNNNNNNNNNNNNNNNNNNNNNNNNNNNNNNNNNNNNNNNNNNNNNNNNNNNNNNNNNNNNNNNNNNNNNNNNNNNNN
NNNNNNNNNNNNNNNNNNNNNNNNNNNNNNNNNNNNNNNNNNNNNNNNNNNNNNNNNNNNNNNNNNNNNNNNNNNNNNNNNNNNNNNNNNNNNNNNN
NNNNNNNNNNNNNNNNNNNNNNNNNNNNNNNNNNNNNNNNNNNNNNNNNNNNNNNNNNNNNNNNNNNNNNNNNNNNNNNNNNNNNNNNNNNNNNNNN
NNNNNNNNNNNNNNNNNNNNNNNNNNNNNNNNNNNNNNNNNNNNNNNNNNNNNNNNNNNNNNNNNNNNNNNNNNNNNNNNNNNNNNNNNNNNNNNNN
NNNNNNNNNNNNNNNNNNNNNNNNNNNNNNNNNNNNNNNNNNNNNNNNNNNNNNNNNNNNNNNNNNNNNNNNNNNNNNNNNNNNNNNNNNNNNNNNN
NNNNNNNNNNNNNNNNNNNNNNNNNNNNNNNNNNNNNNNNNNNNNNNNNNNNNNNNNNNNNNNNNNNNNNNNNNNNNNNNNNNNNNNNNNNNNNNNN
NNNNNNNNNNNNNNNNNNNNNNNNNNNNNNNNNNNNNNNNNNNNNNNNNNNNNNNNNNNNNNNNNNNNNNNNNNNNNNNNNNNNNNNNCTAAGTAAC
TGCTAGATCCTTGGACTTCCATTCACAGCTGCTACTGAACCATTGTTGGGAATTGGACTGTAGACTGTAAGTCATCAATAAATTCCTTTACTATATA
GAGCCTACCCATAAGTTCTGTGACTCTAGAGAACCCTGACTAATACAACATGCATACACATAAAATTAAAATGTGCCAGGCAGTGGTAGCACATGCC
TTTAATCCCAACACTTGGGAGGAAGAGGCAGGTGGATTTCTGAGTTTGAGGCCAGCCTGGTCTACAGAGTGAGTTCCAGGACAGCCAGGGCTACACA
GAGAAACCCTGTCTCGAAAAACCAAAAAAATAAAAATTAAAAAAATAAGTAGGTAAATTAAATTAAATTAAAATGTTTAAAAAGAAGAAATCTTGGC
TGAATATTCTACAGTTTTTTAAGAGTTTGTCAAACATTTTGATGTTACAATGGCCAATGATGACAGTAGCCCCTCACATAAATACATAGTACAGAGG
GCAAAAGTGTGCACAGGGCCAGTTCAGAAATTGCTGGAAAATTCTGTCCTGACCCTAAGACAAGTTTCACTGAACAATTTTTTTATGAAAATGGTCG
GGCTGGAGAGATGGTTAAGAGCACTGACTACTCTTCCGAAGGTCCTGAGTTCAGGTCCCAGCAACCACATGGTGGCTCACAACTATCCATATTGAGA
CCTGACGCCCCCTCCTGGTGTGTCTGAAGATAGCTACGGTGTACTTACATATAATAAATAAATAAATCATCAAAAAAAAAGAAAATGGTCAATTTTT
AAAATCAGACATTCTAATATAATACAAACCATAGCTATACTAATTTGACACCTGTTGAGGCCTGAGAGCACAACACATTAAAGACTTGGCTTGCCAT
AAGGAACCCGTCATGCCTCTGTGAGAGCAGAGAGCTGTGTACAAGATGGATGGACGTTGTACTTCTTACAATGCTGGTCTGGGTTGAGGGGGTTTCA
TTCGGGTGCTGTGTGTTGGTGCAGATGGAATGACCTCGTGCAGTACAGAGCACAGAACCGAGACTGCATTGAAGTCTTGGGATGCAATATAGGTGAG
CGTCTAGAAGCACCCTTAGATCTGATTATGCATTTGATGTACTTCATTTTTAGACAGGACCTCACTATGTAGCTTTGGGTGGCCTGGCTGAGTAGAC
CAAGCTGGCCTCAAATTCCAGAGGATGCATCTGCCTCTGCCTTCTGGGTGCTTGGAATCAAGGTATGCGTGCCACCAGGCCCAGTAAATTTAATTTT
TTCAAATTAATTCTTTTCTCATGTTTAGAAATCTTTTCCTGGTTTTTGTTGTTGTTTGTTTGTTTGTTTGTGACTCCTACATTGGGTTTTTGTGACT
CCCATACAGAATTGGGATCCACAGTTTTTAAGAAACTGGGCACTAAATTACCCCTGCCTTATGCAAAGCCCACAAGGACAATCTGGAGAGACCGCTT
ATGTGAACAGCAGGAGCTGACTCTGTTCAGGGAGCTAAAGGGTAAAACTGTGTATGCTGGACCACTCCATTTCTGGGGGTTCCTGGCAAGCCTTAAT
GTTACTCATCTGGACCTCCCTCTATTTTCAGGCTGTCTTGGGTCTTTACGTTGTAGCTTCTCATGGCCTCCTCCTCAGGGTCCACTACCACCCACCT
TAAACAATGCCAGTTCCAGCCTTTCAAGCTGAAATCAAGTGTAAAAGGCCCAGCCATGCTTGAGCAGGCCTTCCCTGCACAAGTTCAACCACAAGCA
AACTTCTGAGTGAACTGGGTGGCTAGGACCCTTCCAGAGCAGACTTGGCAGCAGGCCTCTGAGCTTGAGAGCAGGTTCCAAAACTCTTGGTTTCAAG
GGTCCGCACCCACTGGCAACAGTAAGGAACCTTCTGGGAGAATGGGCAAGCACTTCAAGTCTTCAATCCTGCAGACACTTGGTCTTTAGGCACTGAT
GCAACCTCTCCAATAGAGGACTAAAGGACCCACCATCCATGAAGCATGGGGACAGGCACTCCAGCCCTGCAACCCAGGAATGGCCAGGGTCTTATGG
AAAGTGCCTCTGGGAAGCTGACCACAGAAAGGCAAGGAGTGACTTCCCTTCTTAGAATATTAACCTGAGGTCACCCTAACTTCTAGGAAATGTGAGC
AAAGCCCTATTCACCCCAGATGGGGCTCCAGTGACAGACCAAAGTATACTTCTGCCACAGCCCAATTTGGTGAACCAATGAGTTTCTAAGTGGTTAG
TTGGTTATAGGAGTGTGGGAGACACCCCAGCTACAGATAATGATCTTGTGGGAGTTAAAAAAAAAGGGTCCCCACTTCTAGTATACTCCTGAATCCC
CTAAGAGCTCTGCTGCTGGGGACAACCAGGTGAAGTAGTGGCTGGAATCCCAGGGTCCTCCCTGCCTTCTCCCTGTCTGTCACCCCCTTACCATGTG
GTTATCTCTGTAACTAGTTGCCACAGCAACCTACCCTACATCATCATTAAGATGGTGGTAGAGTGAACTGAACTACAACACAGAGCCACAGGCTGCT
GACCTTTGAGACAGGTTCCTGGTTGTCAGGGCTCTGGGGTCCCATGCCTCATTTTCTCTGTCAGCCCTGTGACTTCAGTTTCCTGAGATACACAGCA
ATTTCTAGCTCTGCTCATAAAGCTGGGAGCCACTAAGGTCAGTGGGGCAATCTTTCTAGTCAGCACACTTTGGTCATCTCCAGGTGGAACCTCAAAG
TGAACATGGGAGTCTCCCTCCCAGGAAGTCTCCCTGCCACCTCCTCAGGTAACTGAGTGCTCCCCTACCTCTGGGCTCCCAGAAGGTGGCAGCCATT
ATCAGAGAGCCCACACGGGGTCTGAAGCATCTGACAGCCCTTCAACACTGCTCCTTCTCTATAAATCCATGCTTTCCTAGACCTGCTAGATTCAAGA
CATGCCATAGGCTCAAATGAGCAAGAAACTAGGCTGGAGCAGCAGGCACAACTCTCACCCCACTATGCTTTGTCCCGCCTGGAATTGGCCCTTTACT
GTGACCTCCTGCAGTCTCTCCACCAGCCCACGTTGCTGACTACAGTCTGGTACATGTAGACTTAGTGGTATGGGGAAGTCAGGGCTTAGCAAACAGA
ACTGTGGCCCCTTCTTCCAGTTTCCTCATCTCACTACCAGGCAGAGGAAGAAAAGGTTTGGGGTAAATAGAAAATAAGGAGGGAGTGAGCCAGAGTT
TCTGGGTGTTTGGTCTCAACACAACTATCCTACAAACATCACCATCAGCAGGGCTGGGGGATGGAGAGGTGGTTAAGGGTGCTTGATGATGCTCTTG
AAGAGGACCCTGCTTCAGTCCTGACCACCATATGACAGCTCACAAGCACATGGAACTCCAGTTNNNNNNNNNNNNNNNNWNNNNNNNNNNNNNNNNN
NNNNNNNNNNNNNNNNNNNNNNNNNNNNNNNNNNNNNNNNNNNNNNNNNNNNNNNNNNNNNNNNNNNNNNNNNNNNNNNNNNNNNNNNNNNNNNNNN
NNNNNNNNNNNNNNNNNNNNNNNNNNNNNNNNNNNNNNNNNNNNNNNNNNNNNNNNNNNNNNNNNNNNNNNNNNNNNNNNNNNNNNNNNNNNNNNNN
NNNNNNNNNNNNNNNNNNNNNNNNNNNNNNNNNNNNNNNNNNNNNNNNNNNNNNNNNNNNNNNNNNNNNNNNNNNNNNNNNNNNNNNNNNNNNNNNN
NNNNNNNNNNNNNNNNNNNNNNNNNNNNAGGCAGGCGAATTTCTGAGTTCAAGGCCAGCCTGGTCTACAGATTGAGTTCCAGGACAGCCAGGGCTAC
ACAGAGAAACCCTGTCTCGAAAAACCAAAAAACAAAACAAAACAAAACAAAACTCCTCACTAACACTAGCTTTATACAGAACTTCAATCTGTATTTA
GCTCCAGGCTACAATTGGTCCTGCAGTCACAGTTAGGGATTACATAGTGTCTCTGCAGGCCCAAAAGGCCTTCTGGATCACAGTTTAGACAGACTGC
AGGACCATTCTGCCAGGCCCTCTCTCTGTTTAGTTACTTTTCTGTGTTGACAAAAAAAAAAAAAAAAAAAAAAAAAAAAAGGCAATTTGCGGGATGA
AGGAGTTTATTCTGTCCAGTTTATAGGTGGCAATCATTATGGTGGGAGGCATGACAGAAGGAGCCTGAGGCAGATGCTCATATCGCATCCACGGCCG
GTGAACACTGTTGCTCAGCTCACTTTCTCCTTTCTTTTCAGTCCAGGACCCCACTTCATGGGACACAGCGCATTCAAGGTGGGTCTTCCCTTCTCAG
TTAAGCCTCCCTGAGAAGACCCTCCCAGGCACACCCAGAGGTATCTACGAGGTGATTCTAAATTGTCTCAAGGTGACTATCAAGCAGGCAGCAAGCT
GAGCAGAAAGACTTGGGGAAAGCCAGCCCAGAAACCTCTGCCTCAGACCTCCAGCATGTGACAAGTGATTGCTCATAAGGGATGACATCTAAGCTAG
AGTCACAGGAAGCCAGAACAGGGTGGGATGAGTGATAGAAAACAGACCGGTAGTGGGGACACATAGCTCACAGGACATGGTCTGAGAAGGCAGGGGA
TTGACCAGCAGCTCAGTGATTATCAAGGACACAGGTTCCACTGGTACCTGACTCTGCCACCTTCAGCGACAGCTTGGCCACAGCTCCCACAGTTGTC
TATGGCAGTCCAAGTAACACCTTCATGGTACAGCATCCAAAAGCAGAGCATTCTTCTGACGACCTATGCCCTCCCCTTTCACAGCAGGTGTGACTCA
GTGGTGGGAGGAGGCGGCATGCCCACGTGGCAGAATGGTCCTGTAGTCTGTCTAAACTGTGATCCAGAAGGCCTTTTGGGGTAACCAAAGCATTCTG
GGGACTTGATGGGGACTTTGAGAAAGGGTCAAGTGGGCAGAGGTCAAGGCTTGTACAGGAACATGGAAAGTTATCAGGCAAGCGGCTGTGGTGATGC
TGATGGGTGGGAGATCTGACACCTGATGTACACAAGGTGAGGGGATAGGAGGTAGAGATGAAGGGAGAAGAGAGGGGAAGAGACAAGAGAGGAACTA
GCAACTGATTGATACCTGTAGTGAATGTGACAGGCACAGTAGGCCCATATCTGTGAACCTACATCTTGACATGCACCATCTTGGCACTGAAGGACTG
CTGCAGCTGTCAGTAGAAATGATCCCAGACAGACTACTGCTTTAAAATACACTATTTATTCTTTTTTCTGAATATAATAGGAAAGTAAAATATGGTG
ATAACAGCAGCTCAGTTCTCACACCGAAGAGTCCCTGATCCTGGGCACCTGAGAGAGTGGTGCTGAATACCTGAGAGGTAGCCGCCAGGCCCAGGAG
GCCAGGTGCATGGTGCCCCAAGCCTCAGACTCAAAACATATTTACAAATCCTTCGGACATACAGCTAGGCTCTATTCTGACTAGATTATAACTGAAG
ATAACCCATTTATTTTAACCTGCATTCTGCCAGCTGGCTGGTTACCTGTGCTCAGGTACCATGTGTCCATCTCCTCACATCCTCCCTGGTAGATCTC
CCACCTGGCTCTATCCCAGAATGCTTTCTCTCTCCCAGATGTTCCGCCTATTTCCTGCCTAAGCCATAGGCCATAGGCTTTTTGCCACAGGTGAGGC
ATCCATACAACACAAAGATATTCTCTCTACGAAATGCCTGAGAGCACTGTGCCACTCCTGCCAGCTCGTCTTATATCTGCCTGTAAATACCATGCCA
GACACACAAGCTGTTGCTAAAGGAAGTACAGTGTCACCAGGCAAGCCCTACACATTCACAGTGGCGGCCACCAATTAGTCCTGCTTTGGTTTCCAAT
AGTTCCCCTAATGCCACTTTTTGTTTGTTTGGTTTTGAATTCACTTTGTAGACTAGGCTGACCTCAAACTGAGAGATCTGCCTACTATCTCTTGAGC
ACTGGGATTAAAGGCGTGCACCACCAGCACCCAGCTCCATTGCCACTCCTTAATGTATAGAGCTCACCCCACACCTGTTAGGAGCAGCATGAAGGCC
CTGCTTCAGCTTCCTCCCTTGTCTCGTCACCCTTGTCTTCTCAGCTGGGCATCCAGAGGCAAACCAAGTCCAGTGGAGCCTGAGTCCTGTGCAGATA
GCAGGAATCAGGTCCTCCAGTGGTGTTGGCAATGACAGCGCATGTTGGAGGCAGAGGCACCATGTGGTACTTCAGGGCATGGACCTGGGGTGGGGGC
CAGCTCTGCCACCAGGCCCTTAGACTAGATGGGTCTATTTTATCACTTCTAAGCCATAAGGTATCCTCCACCTCTGGGGCTGCCAGAGGGATGGAGT
GAAACAAGGAGGCCCAAGCATGGCCAGCAGAGGCTCAGCAGGCAGCAAAGATCCTGTCACGGCTTCCCATGACCCATTTCACATCGGCCTGCCTCTG
TGAGTCCCACCCTCAGGGTAACCCTACCCAGGGCCACTCACTCTGGCCAGTGACAAGCGGTCTTTTGAGTGTGTTGCCCCTGTGCAGAAGGCAGGGT
GGTCAGGTAAGCCACCTAGGCAGAGACTCAGGGAAGAGGCCAAGCTGGTCCTCCCACAGAACAATGGATTCCTCTCAGGCTTGCCTTTAATCACTGT
GACACTTAATGTGCAGACATCTGCTCTTCTGTGGGTCCTCAAAACGCAAGTCCAGAGCCTCCTGGAGTCACCTTGAAGTCTGGCTGCACGTTGAGCA
GTGAGCACAGCTGAAAGTACCCAAGAGCCCATGCCTTACACCTCCTGCACTTCTGCTCAGCTTTCCCTATCCCAGCACAAGCCCAAAGGCTATGTCG
CCTTAACGTCCCCAACCCACTTTCAGTCATTCTACAAGGGCCAAGGAAACAAGTTCCTCTGGGTCTATATCTGGGCACACATTGCCCAACACAACCA
TCACATGAACCCTAGGGCCCACGCCAACCTGGCCTTCAAAGCCCCCTCAGGCACACCCCATAGAC
MOUSE SEQUENCE - mRNA
GAGGGCTGTCGGCGCAGTAGCAGAGAGCTACAGACTCCGCGCGCTCCGGAGACCGGCAGTACAGCGCGAGGCAGCGCGCGTCAGCAGCCGCCACCGG
AGCCCAACCGAGACCACAGCCCTCCCCAGACGGCCGCGCCATGGAACACCAGCTCCTGTGCTGCGAAGTGGAGACCATCCGCCGCGCGTACCCTGAC
ACCAATCTCCTCAACGACCGGGTGCTGCGAGCCATGCTCAAGACGGAGGAGACCTGTGCGCCCTCCGTATCTTACTTCAAGTGCGTGCAGAAGGAGA
TTGTGCCATCCATGCGGAAAATCGTGGCCACCTGGATGCTGGAGGTCTGTGAGGAGCAGAAGTGCGAAGAGGAGGTCTTCCCGCTGGCCATGAACTA
CCTGGACCGCTTCCTGTCCCTGGAGCCCCTGAAGAAGAGCCGCCTGCAGCTGCTGGGGGCCACCTGCATGTTCGTGGCCTCTAAGATGAAGGAGACC
ATTCCCTTGACTGCCGAGAAGTTGTGCATCTACACTGACAACTCTATCCGGCCCGAGGAGCTGCTGCAAATGGAACTGCTTCTGGTGAACAAGCTCA
AGTGGAACCTGGCCGCCATGACTCCCCACGATTTCATCGAACACTTCCTCTCCAAAATGCCAGAGGCGGATGAGAACAAGCAGACCATCCGCAAGCA
TGCACAGACCTTTGTGGCCCTCTGTGCCACAGATGTGAAGTTCATTTCCAACCCACCCTCCATGGTAGCTGCTGGGAGCGTGGTGGCTGCGATGCAA
GGCCTGAACCTGGGCAGCCCCAACAACTTCCTCTCCTGCTACCGCACAACGCACTTTCTTTCCAGAGTCATCAAGTGTGACCCGGACTGCCTCCGTG
CCTGCCAGGAACAGATTGAAGCCCTTCTGGAGTCAAGCCTGCGCCAGGCCCAGCAGAACGTCGACCCCAAGGCCACTGAGGAGGAGGGGGAAGTGGA
GGAAGAGGCTGGTCTGGCCTGCACGCCCACCGACGTGCGAGATGTGGACATCTGAGGGCCACCGGGCAGGCGGGAGCCACCAAGTAGTGGCACCCGC
AAAGAGGAAGGAGCCAGCCCGGGTGCTCCTGACGACGTCCCCCTTGGGGACATGTTGTTACCAGAAGAGGAAGTTTTGTTCTCTTTGTTGGTTGTTT
TTCCTTAATCTTTCTCCTTTCTATCTGATTTAAGCAAAAGAGAAAAAAATATCTGAAAGCTGTCTTAAAGAGAGAGAGAGAGAGAGATAGAATCTGC
ATCACCCTGAGAGTAGGGAGCCAGGGGGTGCTACAAAAATAGAATTCTGTACCCCAGTAATCAACTAGTTTTCTATTAATGTGCTTGTCTGTTCTAA
GAGTAGGATTAACACAGGGGAAGTCTTGAGAAGGAGTTTTGATTCTTTTATATGTTTTAAAAAAAAAAGCTTAAGAAACATTGCTTTAAAAAGGAAG
GAAAAAAAATACAGCAAACCATTGTTAAAGTAGAAGAGTTTTTAGGTTGAGAAATGTACTCTGCTTTGCTGAAAAGCCACAGCTTAGGCCCTCAGCC
TCACTCCCTGGCTTGCTCAGTGCCTACAGCCCTGTTACCTGATACCTGTGCTTTATCCCAGGGGTGGGCAGACCTCTTAACCTTATAGATGGTCAGT
GCGACCTCTAGTGGTCTCATGGCGTGTGGCACAACCCCCCTCCCCAGGGCTCAGCTTAATGTGCCCTCTCCCCCCAACAACCTGCAGGTTCACAGCG
CCAGCCACACAGCGGTAGGGATGAAATAGTGACATAATATATTCTATTTTTGTAACCTTCCTATTTTGTAGCTCTGTTTAGAGAGATGCTGGTTTTT
GCCTGAAGGCCCTGCAGCCTGCCCACATCAGGTTAAACCCACAGCTTTGTGTGTGGTTTGTTTTGTTGTGTTTTCTTTCTCTATGTTCCAAAACCAT
TCCATTTCAAAGCACTTTTGGTCAGCTAGCTGGAGGCAGTGTTGCTGGTGTGTGTTGGGGGGAGGGGTTCTAATGGAATGGATGGGGATGTCCACAC
ACGCATTCAGATGGCTGTACAACAGGTTGTAGGGCTGGTAGTATGAGGTGCTTGGGAAGTTTTGTTGGGTCAAGAAGAGAGAACTCTGTTCTCGCAC
CACCGGGATCTGTCCTGCAAAGTTGAAGGGATCCTTTGGTGCCAGCTGGTGTTTGGAAGTAGGAACCATGATGGCATTACCTGGACAAGGAGATTGG
GGACAACTCTTAAGTCTCACACAGGAGGCTTTTAAACACTAAAATGTCTAATTTATACTTAAGGCTACAGAAGAGTATTTATGGGAAAGGCTGCCCA
TGACCAGTGTGACTCAAAGCAATGTGATCTCCCTTGATTCAAACGCACACCTCTGCCCTGCTGGAGAAGGTTTAGGGCCATGTCTGAGAGATTGGTC
TTTTATTGGGCAACGGGGGGGGCGGGGGGGGGGTCCTTAAAAAAAAAAACCACAAAGACAGAGATTTGGTCTGCTTGACTTTTCCCAACCCAACCCA
ATTGGCCCCATTGGAGAGCCATCCAAACTGAGGAAAATTAGGGGACTCCAAAAGAGTTTGATTCTGGCACATTCTTGCCGCTGCCCCCAAGTTAACA
ACAGTAGGTAATTTGCACACCTCTGGCTCTGTGCCTTTCTATTAGGACTTTTTGGCAAAAGGTGGAGAGCGGGAGGCTTAAGAGGGGATGTGAGGGA
AGAGGTGAAGGTGGGACCACATGGGACAGGCCACGGCTCCTCTCATGGCGCTGCTACCGATGACTCCCAGGATCCCAGGCGTTCAGAACCAGATTCT
CATTGCTTTGTATCTTTCACGTTGTTTTCGCTGCTATTGGAGGGTCAGTTTTGTTTTGTTTTGTTTTACAATGTCAGACTGCCATGTTCAAGTTTTA
ATTTCCTCATAGAGTGTATTTACAGATGCCCTTTTTTGTACTTTTTTTTTTTAATTGTGATCTATTTTGGCTTAATGTGATTACCGCTGTATTCCAA
AAAAAAAAAAAAAAAAAAAAAAGAGGTTCCTGTTCACAATACCTCATGTATCATCTAGCCATGCACGAGCCTCGCAGGCAGGTGGCCGGTCTGCCTC
CAGGGATCCTGGGACCCTGATGGCGATCGTCCTGTCATGCTGGGCCCTTCATTTGATCTGGGACATAGCATCACAGCGGTCAGGGCACCTGGATTGT
TCTGTTATCGATATTGTTACTTGTAGCGGCCTGTTGTGCATGCCACCATGCTGCTGGCCCGGAGGGATTTGCTCTGAGTCTCCGGTGCATCATTTAA
TCTGTTAGGTTCTAGTGTTCCGTCTTGTTTTGTGTTAATTACAGCATTGTGCTAATGTAAAGACTCTGCCTTTGCGAACGCAGCTGCAGTGCTGTAG
GCCCCCAAGTTCCCTAGCAAGCTGCCAAACCAAAACGGGCACCACCAGCTCAGCTGAGGCATCCCAGCCAGGCAGGACCCTTGAGGGCCGCTGTGTC
CATGGTGATGGGGTGAGGTTTTGGCCAAAAGGCCATAGACTGGTGGTGGGTCCACGGAATCTGCCCTGTGACATGAAAGGCTTTGAGGACTCTGGCT
GGTGGCCAGGTTGGCTTTTTGTATTTCTGGTTGACACACCATGGCGCTTCCCAGCACAGACATGTGACCAGCATGGTCCAGGAAAAAAAAAAGACAA
AAAATCTAGAAAATAAAATTGGTAAAATCTCAAAAAAAAAAAAAAAAAAAA
MOUSE SEQUENCE - CODING
ATGGAACACCAGCTCCTGTGCTCCGAAGTGCAGACCATCCGCCGCGCGTACCCTGACACCAATCTCCTCAACGACCGGGTGCTGCGAGCCATGCTCA
AGACGGAGGAGACCTGTGCGCCCTCCGTATCTTACTTCAAGTGCGTGCAGAAGGAGATTGTGCCATCCATGCGGAAAATCGTGGCCACCTGGATGCT
GGAGGTCTGTGAGGAGCAGAAGTGCGAAGAGGAGGTCTTCCCGCTGGCCATGAACTACCTGGACCGCTTCCTGTCCCTGGAGCCCCTGAAGAAGAGC
CGCCTGCAGCTGCTGGGGGCCACCTGCATGTTCGTGGCCTCTAAGATGAAGGAGACCATTCCCTTGACTGCCGAGAAGTTGTGCATCTACACTGACA
ACTCTATCCGGCCCGAGGAGCTGCTGCAAATGGAACTGCTTCTGGTGAACAAGCTCAAGTGGAACCTGGCCGCCATGACTCCCCACGATTTCATCGA
ACACTTCCTCTCCAAAATGCCAGAGGCGGATGAGAACAAGCAGACCATCCGCAAGCATGCACAGACCTTTGTGGCCCTCTGTGCCACAGATGTGAAG
TTCATTTCCAACCCACCCTCCATGGTAGCTGCTGGGAGCGTGGTGGCTGCGATGCAAGGCCTGAACCTGGGCAGCCCCAACAACTTCCTCTCCTGCT
ACCGCACAACGCACTTTCTTTCCAGAGTCATCAAGTGTGACCCGGACTGCCTCCGTGCCTGCCAGGAACAGATTGAAGCCCTTCTGGAGTCAAGCCT
GCGCCAGGCCCAGCAGAACGTCGACCCCAAGGCCACTGAGGAGGAGGGGGAAGTGGAGGAAGAGGCTGGTCTGGCCTGCACGCCCACCGACGTGCGA
GATGTGGACATCTGA
HUMAN SEQUENCE - GENOMIC
CATGCCTGTAATCCCAGCACTTTGGGAGGCCAAGGCGGGCAGATCACCTGAGGTCAGGAGTTCGAGACCAGCCTGGCCAACATGGTGAAACCCGTCT
CTACTAAAAATACAAAAAAAAAAAAGAAAAAAAAGAAAGAAAAGAAAAATAGCTGGGCATGGTGGCGCATGCCTCTAATCCCAACTACTTGGGAGGC
TGAGGCAGGAGAATCGTTTGAACCCAGGAGGTGGAGTTTGCAGTGAGCTGAGACCGCGCCACTGCACTCCAGCCTGGGAGACAGAGCAAGCCTCTGT
CTCAACAAAAAAAAAAAAAAAAAAAAAAAAAAAAGGGGAAAAATCACTCCAATCATCCCAAGTCTCAGCTCCTACTCTTTTGCTATATGTCCTTCAA
ACCAGCTATGTATTTATTTTGCTGAATTTATGCTGGTTTTATCTTTTGTATCTTGCTTTTTTTCATTTAATGTTTTTCCATCCAGTGAACACACCCT
AATTTGCCATTCCCCTCTTCTTGAACATGAGATTGTCTCTAGGGTATCTCTTGCAAATAGGATAATTGTCAATGATGTAACGGGTCTCTATGCAACT
TGCAAAAGTGATCAGTCTTGGTGTCCTCCTCATCCTAGTGTTTGGTTCCAAGCAACAGAAACCAATGCTGGCAGATTTCAGCAGAAAAGGAAAATCA
GATGCAGAAGATAGGCAGGAACAAGGGAGGCAAGACAGCACGAATCACAATGGAAGCATGCTGCAGATCTTCTCTGATGAGAAGCCAGGGCTACCCC
TACCCATCCCAACACCAGACCCTCCAGTAAAACTGCAGCGGCCCACACCACCTTGTCACCAGAGCCCACAGCTCTATGATGGGCAGCACAGATACTG
CTGCTCATAAACTTGAATGCCTCACCCAGTTCTACACTAGAAAACATTTCCTACCTTTTCTGATTCTTCCCACCACCAGCTCCCAATTCAAAATCTT
GATCCAAAAAGATGAAATGTATAAATAATACTATTTATAATGACATCAAAATATCAAGTACTTAAGAAGAAATCTAATAAAAGATGCACAACACCCA
ACACACACACACACACTCACACACACACACCTGCAATTAAATTAAGGACAATCTAAATAAACAGAGGTCTATATCATGCCCATGAATTGAATGACTC
TGTTAGTAAAAGTGTCAATTCCCTCAAAATTGATCTATAGATCCAATACAATCCCAATCAAAATTCCAGCATTGTGTGTGTGCACATGTGTAAGTTG
ATTCTGAAATGTTTATGGAGCCCCAAGGGCCAGGAGTAGCCAGGGCAACCATAAAAGAGAAGTGGGTTGGAGGATTTAGCCCGCCAGATATCAAGAA
TTCGTAGCGTATAGCTTCCATGATGCTTCTGGGGTAAGGACTGAAAAAGAGACCAGTGGAACGGGATAGAAAGTCCAGAAACAAGAGATTTGTGTTA
AGTGAGCAGATTTTAGCTGCTCTGTTCACAAAAAAAAGTAACTATGTGAGATGACAGGTATGTTACACTAATTCACTATGGTAACCATTTTACTATG
TATATGTATCTTATAACATCATGCTGTCAAGTTTATTTCAAAAATAAATTTTACATAAAATCTTAGCAGTGTTATTCATAATAGACAAAAAGTGGGA
AAATTCTATTTTTTTAAAGTACAGAAACTTTATTCCTCAAAGGGGAAATAGGTTAATAATAATAAGAAGAAGAATTAAGGCCAGGTGTGGTGGCTCA
TGCCTATAATCCCAGCACTTTGGGAGGCCAAGGCCAGAGGATTACTTGAGCCCAGGAGTTTGAGACCAGCCTGGGCAACATAGTGAGACCCCATGTT
TACAAAAATTAAAAAATTAGCTGGGTGACGTGACAAGTGCCTATAGTCCCAGCTACTTGGGAGGCGAAGGCAGGAGGATTGCTTGAGACCAGGAGGT
CAAGGCTACAGTAAGGTATGATCGTGCCACTGCACTCCAGCATGGGCAACAGAGCAAGACCCTGTATCTAGGGGGAAAAAAATGATAAGCCTTGTGA
AAGAGAAATGAAAACAGCATCCACACATAAACTTGTACCTCTGTGTTCATCGGCAGCATTGTCCACAGTAACCAAAGGTAGAAACCATCCTAAGGCC
CATTGACTGATGAATGGATAAGCAAAATGTGGTCTATCAATACGATTGATAGTATTCAACCATAAAGAGGAATGAACCATGGACACATGCCACATGT
GGGCCTTGAAAACGTGATGCTAAGTGGAAAAAGCCAGATGCAAGAGGCTGCATAGCATATGATTCCATCTGTTGGAAATGTCCAGAAAAGGCAGATC
CACAGAGAAAGATTAGTGGTTGCCAGGGGCTGGGGAAAAGGGGGAAGAAAAGGGTGAATAACTACAAATGGGTACAGGGTTTCTTTGGCGGATGATG
AAAATGTTCTCAGATGGTGATGGTGGCTGTCCAACATAACAAAATCCATCGAACTATATACTCTAAACGAGTGAACTTTACGGTATGTAAGTTATTT
TTCAATAAAGTGGTTTCAAAAAAATAAAAAGGTGAACCCTACCATTTCTAGGTGCTTTGGAGTTTACCGTTTTTCTCCTTGCATTCTGGAGTCAGAG
TGAGAAGGCATCTCAGCTCTACCACAGCTGAATGATGTGTTGGGCTTCGGTTTCCTCATCTGTAAAATGGGGATAAAGGGCCTCTCCTTGGAGCTGC
CATGAAGATTGAATTAGATGCCCTCTGTGAAGATGCAGGGCAGGTGGAGAGCACAGTAAGCGTCTCGGGGGGCCACGCCATCACCGCCAGCAGGGCT
CACCAGTATCTTTGCCCAGAGAATAGCCGGGGTCTAGGGAGCAGCCAGGGTCTAGGGAGAAGGGCTGCTTCCCTGTGGAGGCTCCTAACTTTCCCAT
CTCCTCCCTGTTTCTCCCCTGCCCACCCCTTACTCCTGGAAGTGTGACTCGCTGCCTCCTCCCGTGACTCCCCTACATTGCATCTCCCCAGTTACTG
TCGTTATCTCTCATCTCTTCTTTCCAAACAGCCTCTGTCTAGCACCTTGGAGCTCGCATGGGAATTCATGGGTGGGTGGATTCCAAGCTTGGCTTCA
TCAGATGACAACTAAAAGGCAGAGGCCTGGGGGGGCAAGGGAGCTCCAGGATCTGTCTCCCTTTGGAGAAGCCCAGGTTCACCTTCCCAGCAAGCTG
CTCCGGCCCCACGCCCCTGGCCCTCAATAACCTTCAGTGGCTCCCTTCTTGCAGCTATAATTCCCCTCTTGGGATGCTACAAAAGGGATTCCAGAGA
TTTTTTTTTCAATAACTCAAAAGGGATGGAGTAAACGATATATGTGCCCAGGACAAGGCAGCTAAGGGAAGGCCTCAGGCTTCCTTTGCCTTTGCCT
GGAAGTATACCAACCCGCAGCCCGGAGGGCCAGCAGAGAACCAATGCTCAGAGCCTGGGGGCCCAAGGAATGCTTTCCAGGCTGGCGGTCCCAGGAG
CCCCCTCTCCCTTCCCTATAGCAAGATACTAAGAGCAGAGGCTGGCCTGGCAGGCCGTGTCGAGGCCCTGAGCTCACATGGCCTTGGCAGCTTCTTG
ACAGTCGTGTCTTTTTGTTTCCAGCAGTGACACTCACTGACCCACACCTTTGGCCAGCGTCCCTTGTGACTGCCCCCTCCCGCTTGAGCAGAATGGC
TCCTATTACACAATGGGTGCCAGGAACCTGGCCAGTCCATCCAGAGACAGGGCAGAGCCCTGGGCTACCGACCCTCTGGGGCCAGCAGAAACCCTCC
CTATGGCTCTGCCTCTCATCCTGGCATTGACACTTGTGCCCTTAATTAAAGTGCTTCTTTTTTAAATCAACATTTCTACTCCTTTTGCAGAGTAAGA
GAAAGAAGAGTTAGGGGAGAAGAAAGAAGGAAGGATTCATGGGGTTATTTTTTTTTTTTCATGTAAAAGTTTGTTCCGTGATTTAAATCTCATGTCC
ACAAACAGCTCAGGAGAAGTCAGCATAGAGAAGCAAGCTGACAGATTATAAAGTCATTTGTAAAATCCTCTTTCTGCATATAAACTGAAATGTGTAA
TTAATTCCACATACTGCGTGTGGCACATGGCCTTCATCCTGCATAAGAACAAATACATGAATGAATAAATCGAGCAGGCCTTGACACTCACCAGGCC
CTGTGCTAAATGCTTTCTACATATTACCTTAATTACTCCTCACCGTGGCCTTGCGAAGAAAACGATCACAGCCCGTTTTACAGATGGGGACAGAGAT
TTGTCCAAGGCCACACAACTAGTGGCAGATGTAGGTCTGTATGTGACATTCTTGTTCAGTTTCATAAATGTGGCTGCCACCTGCCTGAAATTTTGAG
GGAAAAAAAAGTGGTTTGGCTTTGCATGAATTCTTGAAAAAGTAGATTTTTATCTTTACCAGCTTCTAAGCAAGCTGGATTTATTCTGACAGTGTCC
ATGAAATGGCTACAGACCATCACCGTTGCCAATGTTGTGAACCTGAACAAGGCACCTGGTTTCTCTGTGCCTCGGTTTCCTTACCATTAAACGCATT
TCCCTGAGATTAAGTGTGTGAAACTATAAGTTGGCTGGAGGAAACACCTCATAGAAGTGAGAAGATGAGGATGGGTGGTGAGTGAAGGCTTTTTCTC
CAAACCCTACAGGAGATGGACCTCAAAGCAAATGGCCATGCTTCCCTTAGACTGGGTGAACTGGTGCTGCTCAGGGCTAGAAGTGTGTCTAGAAGCA
TGGGGACCAATGCAGCCCCCTCCACCCTAGGGCACATAACCTGTCTCTCTCCCATAGGATAGCAGAGACAGCTCTCTAAGTCAGGATTCAGCGAGAT
GGTCCAGGAGGGGCCTAAGGATTCCTCTGACTTATCCAAGCCTGGGGAGGCAACACAACCTAGCCTGTGTCTCAGGGGGCCCCAATCATGCCCTGAA
CCTCATGAGCCCAGGCAGGCATCCTGTTGGTTAAGGTCGGCCTCAGGGTCCAGGGATGCACTAGATTCTTTATCTTAAAGTGACCCTCAAGAAAAAA
AAAATAAAATGTAGCTATAGGCAGTTTCTGGACGTTTTCCTATTTGTTAAGCACCTTCTTGCTCCGAGCTTTCCAGCCACAGTGCACTGGACGCCAT
CGGAAGGCTGCAGCTGCTATTTGGTGCTTTACCACCGCTGAGAAGGTGGAATGGTCACGGCCCGGTTCTGTCACTTTCTTCAGCCGGACAGTCGCCT
TATTACGGATTCCAGTAGGGCCGAGCACACTCCTTCCTGCCCGTCTTTACAGATGAACATGCTATCGCTCCAGCAGTACAACCCGCCTTATTACGTA
AAAAAGCAGCCCCTATCTACCCGCAGGGAAGGAGTATGTTCGGCACCACAGCTGGACTGGTGCTCGAGTTAAGCGTCCTGGGAGGTCCGCATGCGCT
CCGGAACCGTAATGCGCGCTTTTTCTAAGCCTTACGGTAAACGCGGACGCAGGGCAACCACGTGGCGGTGGAACCGAGGCCCGGCGGGAATGCGCGG
AATGCGCGGCGCGGCCTCGCGCGGTTCCCGAGCCACGGCCCAGGGTCCGGCGGCGCGCGCTCTCGCCTCCTCCCCTCACCTCTCCCAGCCGCACCCC
GGCCCTGGCCCTGCCACCCAGAACTCGCTGGGCAAGTCGTGCCCCGCGTGAACACACAGAAGGGGCTTGGGGACCGAGCGCGGCCCATCAGTCCCTC
AGACCCTGAGGACCCAGAATTCCCTAAGGGGTCCGAATCCGAGTCCTGCCCCCAGCCCTTAAGGCACGGGCTCCAGGGACCCCAGGGGAAGGGCGCG
GGGCATTAGGTACGCAACCCGTTTCCCCGCACCTGGAAAAAAACTCCCTTTCCCTCCCCTCCCCTGCTTGTTGAGTGTGCGGATAACCAGAACTCTA
AGGCGCCCCGTAATAACGACCCCGCTGTCCCTCCACCCACCCCCAAGTGCCAAAGCGAGGGATGGAAGCGCTTTCAAGCGTTCCAAGGGCATTGAGG
AGCGAGCTGGAGAGGCGCGGGGATGCGGGGTCCTCCCCGCAGTCTTCCGGAAAGGGCGGGGGAGGGCGCGGCAAGTTCCGGAGTGGGGCATGCCGTG
GGAGCCCACGAGGGCCTCAGCGCGGATCCTCCGCCGGAAAACCGGCTCCCGCGAGCCGCCGCCGCAGGTTTCCTAGGCCCCGCGAGTCCCGCAGCGA
AGCCCTGCGTCTCCGTCCGACGCGGGGGTCTGCTCAGCCTCGGGTGGGCCGCGGCCAGGCCTGACTGCGGGGGAGAGGGCCGAACGTGACCTCCGAG
GTCACCCCCAGCCAGCTTTCTCTCCTGTGGTCGGAAGTGGTTTTCTTCTCGATCTGGGCGCCTACTCCCCACCACTTGGTCTGAGAGGGGCTGGGGC
CGGAAGGCCAGGGAATCTCTGGTGGATTTGGGGGTTCATATTGCTCAGGGTACCAGCCGATGCGTTTTGAGGGGCGGGAGTCGAGGAATTAGAATCG
CCTTTAACCCTCAAGAGTTGCGCCTTCAGCCTCGGGATCCCAGATGCGTCGTTGGAGCCAGGGCCGCCCCCCTACCTGTTGGGTTTGCGTTTTAACT
CCAGCGCACACCTTGCCGGCAGCCCTCGGAGCTAGGGGAGGGGTCTCGTTTCCCCGCAGCCCGCCGGACAGACGACTGGGGCACGGGAGGGGCGGTG
GCAGGGTGGTCTGTGTGTGGCTGAAACTAATTGATCTGGAGCGGAAACGCACGTCTGCGGTTGGGGCGATGGGGGGGGCGGTGCGGCTGTCCATGTG
CCGAGCGTGTGGCTGTCTCGGGTGGGCACTGGGGCCGGAGTTCGCCCCGGCCCACCTCGCAGTTTTGGGGCGCCTGGGATCGGCGCTACGTAAGCGA
AGCAGAGCTGCCATAGCACGTGGGCCGCCACGCGCACCCCAAAAGCAAGCAGTGTGGGGGGAAGGGGAGCECGAGCGCCTTCGGAGCCCAGGGGCCG
GCTTTCGGAAGCGTTTTCCCGGGCGACTTAAGGGCTTAACAATGGAAAACTCGCGGAGCCTGAGCCAAGTCCTTTCAAGTCGCCGCCAGGTATGCGG
CTGCAGGTGACCCCACCTGGGTGCGCCCGCCCGCCAGCCGCCCTGGTGGAAAAGCGGGTGCGGGAGGTCGCTGGCGAAAGGTCGGGACTGGTCCCTG
CACCACCCGCCCCCAACCCAAGCCCCGAGCCCCGCGGCGCGCAGCCGCGCTGAGTCCCGGGGTCTGCGTCGCGGCGCGCCGGTTCCTGAATGAACGC
GCTCCCTTCCCCCGCCTGAATGAAGGTTCCCACAGCCAGGGACGGTGGCGAACACGCGCCTGCAGCGGAATTCGCTTTCTCCTGACCGACCATCCGC
CCAGGCCGCGGTCACCGGGGCGGGGGCCAGGGGGCGAGGAAAGCGTGAAGGTGATTTCAGTTAATTTTGGATTTTCTTTCAAACAACGTGGTTACCC
TCCCGACTGGGCCACTTGCCCTTTGTCTCCAAATGGTCACCAAGAAATAAGAACAGAGCACTTTAAATGAGCCCAGAATCCGCAGTTCCTGCTTCGT
GGTGGGTTTTAAGAAGACAGTGTAAAGTAAAACTGCAACCGAAAAGTTTTTTAAAGTTGCTTTTCTCTTTGGAAAAAATAAAATCAAAATGCTTTCT
CTGCGCTTCTTGAAGCAATGACCCTCAAAAGCCCAGAGGTATTGGCCCCCTCGGGGGACCCGGGGGCCGCCAAGCAGGGTTCCCCCAGGTGGGGGCT
GGGCAGCTGGCGCTCCCCGCCGGGCCCCAAATTCCAGCGCCGGGCCCGCAAATTCCAGCGCCTCCCCCGCGGGTTCCTGGACGGCTCTTTACGCTCG
CTAACCGGGCTTGCAATTTTGCGCTCGTCCCTGAGCCGGGAAATCAACGAAGTTCCTAGTCGAGATCTGCCCGGTCCGCCTAGTAACAGCGCCGCGC
CCCCATTGGCTCATGCTAATTCCAGTTTCCTCTGTCTTGCGCCCGGGATGGGGGGGTGAAGCTCCCTCCTGGACCCAGAGCCGGTTGTGCCGGAGTG
GGCGAGCCTCTTTATGCCCTGCTGCCCCTAGCCGACTTCGGCCCGCTTCGCGCCTCGGGCTGGGCCAGGGCGCACGCGGGGCTCGGGGCCCCTCGCC
CCACGGGATGGGAGAGGCCGGGTGATAGCTCCGGGCCCCATAAATCATCCAGGCGGCCGCCGGGTCGGGATTTTATGAATGAAAAAGCAGCTGGGCC
GCCCTTGTGCGCGGGCTGATGCTCTGAGGCTTGGCTATGCGGGGGCCAACGCGATTGTGGGTGCTCGGGGAGTGGGGGGGGGCACGACCGTAGGTGC
TCCCTGCTGGGGCAACCCATCGCTCCCCATGCGGAATCCGGGGGTAATTACCCCCCCAGGACCCGGAATATTAGTAATCCTAATTCCCGGCGGGGGA
GGGGGCGCGGGAGGAATTCACCCTGAAAGGTGGGGGTGGGGGGGGTCGCATCTTGCTGTGAGCACCCTGGCGAAGGGGAGAGGGCTTTTTCTATCAG
TTTTCTTTGAGCTTTTACTGTTAAGAGGGTACGGTGGTTTGATGACACTGAACTATATTCAAAAGGAAGTAAATGAACAGTTTTCTTAATTTGGGGC
AGGTACTGTAAAAATAAAAACAAAAGTTAAGACAGTAAAATGTCCTTTTATTTTTTAATGCACCAAAGAGACAGAACCTGTAATTTTAAAAACTGTG
TATTTTAATTTACATCTGCTTAAGTTTGCGATAATATTGGGGACCCTCTCATGTAACCACGAACACCTATCGATTTTGCTAAAAATCAGATCAGTAC
ACTCGTTTGTTTAATTGATAATTGTTCTGAATTATGCCGGCTCCTGCCAGCCCCCTCACGCTCACGAATTCAGTCCCAGGGCAAATTCTAAAGGTGA
AGGGACGTCTACACCCCCAACAAAACCAATTAGGAACCTTCGGTGGTCTTGTCCCAGGCAGAGGGGACTAATATTTCCAGCAATTTAATTTCTTTTT
TAATTAAAAAAAATGAGTCAGAATGGAGATCACTGTTTCTCAGCTTTCCATTCAGAGGTGTGTTTCTCCCGGTTAAATTGCCGGCACGGGAAGGGAG
GGGGTGCAGTTGGGGACCCCCGCAAGGACCGACTGGTCAAGGTAGGAAGGCAGCCCGAAGAGTCTCCAGGCTAGAAGGACAAGATGAAGGAAATGCT
GGCCACCATCTTGGGCTGCTGCTGGAATTTTCGGGCATTTATTTTATTTTATTTTTTGAGCGAGCGCATGCTAAGCTGAAATCCCTTTAACTTTTAG
GGTTACCCCCTTGGGCATTTGCAACGACGCCCCTGTGCGCCGGAATGAAACTTGCACAGGGGTTGTGTGCCCGGTCCTCCCCGTCCTTGCATGCTAA
ATTAGTTCTTGCAATTTACACGTGTTAATGAAAATGAAAGAAGATGCAGTCGCTGAGATTCTTTGGCCGTCTGTCCGCCCGTGGGTGCCCTCGTGGC
GTTCTTGGAAATGCGCCCATTCTGCCGGCTTGGATATGGGGTGTCGCCGCGCCCCAGTCACCCCTTCTCGTGGTCTCCCCAGGCTGCGTGTGGCCTG
CCGGCCTTCCTAGTTGTCCCCTACTGCAGAGCCACCTCCACCTCACCCCCTAAATCCCGGGGGACCCACTCGAGGCGGACGGGGCCCCCTGCACCCC
TCTTCCCTGGCGGGGAGAAAGGCTGCAGCGGGGCGATTTGCATTTCTATGAAAACCGGACTACAGGGGCAACTCCGCCGCAGGGCAGGCGCGGCGCC
TCAGGGATGGCTTTTGGGCTCTGCCCCTCGCTGCTCCCGGCGTTTGGCGCCCGCGCCCCCTCCCCCTGCGCCCGCCCCCGCCCCCCTCCCGCTCCCA
TTCTCTGCCGGGCTTTGATCTTTGCTTAACAACAGTAACGTCACACGGACTACAGGGGAGTTTTGTTGAAGTTGCAAAGTCCTGGAGCCTCCAGAGG
GCTGTCGGCGCAGTAGCAGCGAGCAGCAGAGTCCGCACGCTCCGGCGAGGGGCAGAAGAGCGCGAGGGAGCGCGGGGCAGCAGAAGCGAGAGCCGAG
CGCGGACCCAGCCAGGACCCACAGCCCTCCCCAGCTGCCCAGGAAGAGCCCCAGCCATGGAACACCAGCTCCTGTGCTGCGAAGTGGAAACCATCCG
CCGCGCGTACCCCGATGCCAACCTCCTCAACGACCGGGTGCTGCGGGCCATGCTGAAGGCGGAGGAGACCTGCGCGCCCTCGGTGTCCTACTTCAAA
TGTGTGCAGAAGGAGGTCCTGCCGTCCATGCGGAAGATCGTCGCCACCTGGATGCTGGAGGTGCGGGGCTTCGGGCGGCTCTCTTAAGACTTCCCTG
CAACTTGTTGCCCAGACCCACGTTTCTTTGCTACTCACCCCCCTCCCTTCTCTCCCGCTAGAACTTTGAAGTTTGCCGTGGTGTTTCTAGGGATCCG
TATTTTCAAAATAAAAATTGCGGGTATTTTCTGAAGGAGGAAGGGGTGGGGGTGGGGGTGCTAGAAGTAGCGTTTCGTGGGAGGGGAGAAGGGGGTC
CGGGAGGGGTGCCTTCGGGAGAAGCCAGTGCCAGGGGCACCCCAATGGGCCCGAGGGTGCGGGCTGGCAGGCTGGGTGCGCTTTGTGTCCCCCGCCT
GCGCCCCAGCCCGGCTGCGCCTCAGCGGCCGGGAGCCGCCAACTCCGGGGGGAGGGGGCATAGATTTGATTTTTAAATTAATATCCATGGACACGTA
TGCAAGGGCCGCTCGTGCCAGTATTATGCGCCATCTTTGCTCTTTTATTGCAAAGCAAAAGTGTTTATTAATAATTGGGGGCAGGGTGGGGGCGGGG
AGCGGCCGCCGGGCGCTGGGGCCGCAGCTAAGGGCCGCGCGGCTGCCGGGAGCCCGCGGGAGGGGCGCAGGGACGCGGCATGGGTAGTTTTGGGGGG
ACCCCGCTAGGGAAGGGGGGGCCTTTGTTCAAGCAGCGAGTCCCGGGGCGCCCCGAACGGGCAGCCTGGGCCGGAGAGCACGGCGAGCTGCAAGGTC
GCGTGGCCCCCAAGACGCCAGGGCTTGATCCCCGTCTGCAGGGATATCGGCTTGGAGGACCTTCTCCGAGCGAGCCGGGGGCCTGGGAGCACATTTT
CAGACCTTCGGTGGGCGCCTGAGGGGCCCGCAAGTATTTTAAAATAATTTTTGAAAGTGCGGCGTGGTGCCCTTGCGAGAGGGAAACGCCGCCCGCG
CCCAGGGGGAAGGGGGGGCCCCGGAGTTTGAATTCCTGGGGCTCCCCCCGGAGCCTGTAACGAACTCCCAACCCCCGGCCTGGGTAAAGGGTCGCCC
GAGGGTCATTTTCAGGGTTTTTTTATGCACTTAGTTATTTTTTTAATATTTTTAAATATTTTTTGAAAAGATGACGTCTGGGGAAATGCGGCGCGGC
GGCCTGGGACGCCACCTTTGTGTCTCGCAGGCGCGGCGCCCAACCCCGCGGCCCGTTCCGCGGCCCCGCACCCCAGTTGGTGTCGACCCCCAGTCAG
AGGGACCACGGAGCTCCAGGGCGGGCCAGGGTCCCGGGGGCCGGCAGCCCGCGCCGCCGCGCACGCCGCCCAGCTGTGCCCGCTCCCGCCCCCACCG
TGCCAGCCTCGCGGGGACTTTCCCTTTCAGTTTCGGGGAGGGTGGGTACTGGGGACGCGCGGGGGAGGGGGCGCATCACGGGAAGCTCCTGCCGCCC
CCAGCCCCGACCCCTCGGCGCCCTCCAGACCTGGCGGCCCTGCCAAGCGCGATGGGGGGTGCGGGGGCGTGCGGGGGGGCGGCGCGACCTGGCGGCG
GCGGTCACGGGCCCCGTGCCTCCGTAGGTCTGCGAGGAACAGAAGTGCGAGGAGGAGGTCTTCCCGCTGGCCATGAACTACCTGGACCGCTTCCTGT
CGCTGGAGCCCGTGAAAAAGAGCCGCCTGCAGCTGCTGGGGGCCACTTGCATGTTCGTGGCCTCTAAGATGAAGGAGACCATCCCCCTGACGGCCGA
GAAGCTGTGCATCTACACCGACAACTCCATCCGGCCCGAGGAGCTGCTGGTAACCACTGGACCCCGCCGCCCCCCGCCCCCCGCGAGCCGCACGCAG
GACCACGGGGCCGGGGAAGGTGCAGGCGGTGGCGGCCGGCCCGCCTCTGACATATCTGCTCCTCCGAGGGAGGGCGGCCCCGCCGCCGGGCGTCCCT
GTCCGGGGAGCGGGCGGGATCCTAGCCGCCCTCGTCCCGCCGCCCTGTGTGCGCTTGCCTGCGACTCCCACCGCGTTCGCGCCCCGCGGTGTGGCCG
AAAAGTGGGCGGCGCGCGCCCTCCAGCGGCTGCACGAGGAGCGCCGCGCTCGGCGCTGAGCCTCCAGTTCCAGGTGGTGGGAGGTCTTTTTGTTTCC
ACTTGCAGAGTCTTTTCACGCGGCGGGCGCCTTTTCTGTTTTGATCTGGGATTGCGTGTTGCCCCAGCTCCCTTGAGTCCCCAGCATTCGCCAGCCC
TCCCCTCCAACATCCAGGACCGCACGAGACGCAGGGGCCAGTGCTCTGAGCCGGAGGTGCGGCGTGGCCCGGCCCCCGTGCTGCCGGCTTCCCCGCG
CCCCCGGGCTGGCCCGCACCTCCCCTGATGGCCGCTCACCCTGTGTTCGCAGCAAATGGAGCTGCTCCTGGTGAACAAGCTCAAGTGGAACCTGGCC
GCAATGACCCCGCACGATTTCATTGAACACTTCCTCTCCAAAATGCCAGAGGCGGAGGAGAACAAACAGATCATCCGCAAACACGCGCAGACCTTCG
TTGCCCTCTGTGCCACAGGTAGGGCAGGCCCGGCAGCCCCCGGCCTCCCCTTGAGAGCCGGCTCCTTAGGTGACCCTGGCCGGCTTCTTGCTCTCCA
CCTGGGTGCTGTCTGGGAAGATGTCCCCAGACCCCCTCCTGCGCTGGAGAGCGCTCTTCCAGCTCTGGTGAGCAGAGGCCCTGGATTGTTTGTCGCG
CTGGATGGAGGGAGATTTGCTCCCTCACGGCCACCATGCAGTACCTTGGGCATTGGTGTGGACGGCTCAGCCTGCCTGTGTCCCGTTACTCTGGCCT
CGTCCTTCAGGCCAGGCAGCCTGTGGCCACTCCATGCTGAAAGGGGTTTACCTTGGCCACAGGGCCGCCTCCTTTCTCCACCCACCTCCAGCCCTTC
TTGTGTCCTTAAGGAGCCTGAGCTGCAGAGGCCCCCTCCTGGCCTCTCCCAGGCTGGGCCACCTGCCAGAGGCGCCTCCAGGGGCGGGGAGAGCTGT
CGGCCTGCCTGCACCACGTGCTCTGGGCAGCCGAGTGCAGGGGTGTCCAGCAGAGGAGCTCGGCTGCCTGAGGCCCTGCCAGGGGTGCCGGCAGCCA
GCCGGGCTCAGCTGAGCCCTGAGGGGGCGCTTCAGAGCACTCTCAGCTTGGGCCGCCACCGTGGGCAGCAGAAGCACCCAGTCCTCACTTCCCCTGG
CATGGCCCCAGAGGCCCCTCCCTGACATGGCCTTGGCCCCAGAACCCAGTGGGGACAGACTCGCACATACACAGGGTGCCGCCTCCTGCTGTCCCCA
GCCCTGCCTCTGACCCCCCTGTGACCGCCTCCTTCCCTGGCCCAGGAGGCCTGGTTACCTTCATGGGGGAGCATGGCCCCATCCCACCCAGCTCTGC
TGTGGCCCACCTTTGGTCAAGCCTCAGTTGTCACATCTGTTTGGGGGCTCACTCTGGGTGACCTAGGCCACAAGGCCCACGGGGCATCAAAGAGGCA
GTAGCATCTTCTCCCCTCCCCAGAGGGCAGAGCCCCCCAAGCCTACTTCAGAGCTCCCTTCTGACACCGGTAGCCCGCAGCCGGTATTCCAGAATGG
GTTCTGGTTTAGGCGTGAGGCCTCCCCCACCTCCTCCACCTGCTTGGGGCATGAACCCCTCCCCCACGTTTCCAAGCGAGTCCCCAAGGTGGGCAGA
TGAAGATGCCAAGGATGTCGACCAGTCTGGATGGGTCTGGGGTGGGGGGGCATGCGGCAGACAGGGAGGCATTCTCTGGCTGGTGCTCCTCAGAGGA
GAGAGGCCTCCGGACACTCCAGACAGCCTTTTATGGAGCTGAAAGTGGCTTCAGAGAAATGCAAAGTTTCCTGGAGAGAACGTGGGGCGTGGTTCTT
GCACAGCCTCCCTACAGGGTGGCTCCAGCAGTGGAGCTCCCCTCCCAGGACCCCTGGGTGCTAGTGGGAGGCAGTGGGCAGGTGCAGATTCTCGTCC
TTCCCACTACTGCACACCCTTTGTCTGCGAAGGCGCCCCCAGCGGTGGGTGAAGGAGGAGGGACACTTGGGGACCCAGCTGTGCACGTGCTCTCAGT
GACTGTGGAGTCCACTCCAGGGTGGGTCCCGAGGGAGGGGCAGGAGACCAGGGGACCCACCCCTGCAAAGTGCTCCGGGTCCTGACCCGTGGCCACC
CCATGGAACGTAACTGAGCAGCCAGTGCCTTGTTCCTGCTGGACATCTGTGGAGACAAGAGTGACTTACGGCTGCTTAAAGTCAGAAACAGGTTGAA
GGAGGTGGAGGCGTGGGAAAGAGTCTAGGAAGGTGTTTTTGCCCTCCACGTGGCAAAGGTTACATTTAAAGGTGATGCTGGGTGTTCTCCCTGCACT
AGGCATTCCTGGCCCCAGGTCCCCAGCAGGTGTGCACATGCTGCATACACTCACGCATGGGGGTTTCAGGGCAGGTGCGCCCTTGGCTCCGTGGGAG
GCCAGGTGAGGAACGTCCAGTGCCAAGGAGCTTCCGGGACAGCTGTCACTTCCCTTTACAACCAGGCAGCGGATAGGGTCAAATCCTGGAGCTTTGG
TGTCTAATTCTGGGTGGCTCCTAATCTAAGCACAGACAGCACCACACACTGGGGTGGGGGCACGAGCTTCTGAAACAACGTGGCCCCAGTGACTCCA
CGCTGTGTGTGCCCCTGGAGACGGGGGGGTGCACAAGGTGCGGAGCCAGCTAGAACCTGTCGCTCCCTGCAGAAGCGGTTTCTGTGTGCGGTTCTGA
TTTGCCTCAATGAGAAGGTTTTCATTCATGGCTCCCGGCTCTCAGACTGGGTGGAACTGCTCCCATTTAAAGGGGAAAAGAGGTGGCTCGGCTCGTT
AAGGATTTCTTTTTCTAAGTTGTTACGGCGCCCAGCAGCCGGCFrTGTCTCCCCTTCAGGGTGGCTGCCTTTCTTCCCGGCCCCTCGCCGGCGGCCC
TCTCTTTAACAAGGCCGAAGTTGTTTATTCTCTCGGGATGAAGTCTCGGATGGGCCGCCACACCCCTGGCGGCCCGTGGGGGCCCCTCTCCCTTTGT
GCCTGGGTCGGCTCCCATTCAGCTCCCCCGACCCCCCTTGTTCCCGGGCGCTCAGTGGCGCGAGATGAGGCGATGGGGCCGACAAAGATGCCACACT
CATCCCTGCCGACCTCCGGCTCCCAGCCCAGGGCCCCTGGTTCCTGTGCAGAATTCCTCGTGGGTGTGACAAAAGGCTGCCCCCAGGCTCCGCTGGG
GTGGGGGCCAGGCCAAGAGGCACATCCCACACTGGCCCACCTGTCCACGGTAGGCGCATGACTGCCCTGAGGAGGGGAGGCCGGCATTCCCCGCCAC
AAACCAGGACGTAATTGGTGGCAGGGCTCTCTGTGGAAAGAGCCAGTCTGCTGTTTGTCTAGGAGGTCAGTCACAGAGGCCCCGAGACGCCCACTAC
TGCAGCCTGGCAGGCGGATGAGCCCAGTATCTGGCAGTGACCAGAGGGAGTTTTGTGCAGACCACAAAGGCTGATGGGCTGCCCTAGATTGGTGTCC
CTCTTGGAAGTGGGCCCAGATGTGCGGGACAGTCCCCAGGAAGCCCCAGGTGAGGGCACTGGTGCCCTCTTGGGAAAGCTGCTCCCTCCTGGGGCCC
GGCTCCCGGCCCAGTCCTCCAGGGGTGTCCCATGGTGACTGGTGCTAGGAACCCCACACCTCTTCCCTTACTTGGGAAGTCACTGGAATTGTTGGGC
TACATCAGACGGCCCAGAAAAGTGTTTTTGTCATCGGCCAGAAATAGGAGAGTTGTGAGTAGAGGGCCCGGGTGGAGTTGGGGTGTACTTGGTCTGT
GCTCTGAAGGTCACTGTGACAGTCATGGTCCCATGGTAAGGGGCATGGGTTGCTGGAAGAGCTCTTCCTTCCCGAGTGAGCCAAGCCGGGCTCTCCT
GGCGCCAGGGCCTGAGCCGCAGCCACACCACAGCCGCCCTGAAGGCTGCCGGCCAGGGCTTACCCCTCAAGGGACACGGAATGGCTTCATCAGTACC
CTGCAGCCCCGTGGCCTGGCCCGGGTGGAGGCCTAGGCTTCAGCCATGCGATGTCCCTTCAGAATATGACTTGTCTGCAATCCCTGCTGCTGGGGGG
TGGCAGGTACTTGGGGTGAGGGTTAGGGTCATAGAAGCGACATCTCTACGTCCTCATATTTGCGTCATCTAATTTTGTTTTTGTGAATACGTGATAA
CATTCACAAGGCTCAAGATGCTAAAAGGATGAGAAGGCAGTGATGTCCCCATCACCTGTCCTGTGTCTTCCCGTGGCTTTCTCTTTCCTTGGTTATG
TTTGAGTCAACAGTGGGGCTGACGTTCCAGGAGGGTCCGTGGGCCAGGCTCTTGCTCTCCGAGTGCCCAGGGATGGCTGGAGGCTGAGGAGGGCCTG
GATGTGGAGCCTCAGATACCAAGTGCTTCCCTTCAGGCCGGGCCGCTTGCTCAGAGCCAGCACACAGGGATGCCCGGATCACGGGGGCCCTGAGAGG
GTCCCCTGCTCACAGCCTCCTTCCCTCTCTCCTTCTGCCTCAGATGTGAAGTTCATTTCCAATCCGCCCTCCATGGTGGCAGCGGGGAGCGTGGTGG
CCGCAGTGCAAGGCCTGAACCTGAGGAGCCCCAACAACTTCCTGTCCTACTACCGCCTCACACGCTTCCTCTCCAGAGTGATCAAGTGTGACCCAGT
AAGTGAGGGTGATGTCCCAGGCAGCCTTGCCGGGGCTTACAGGGGGAGACACCTAGTGCCACGGAAATGCCGAGGCTGGTGCCAAGGCCCCCAAGGG
TGACAAGGTTGGGGCTGGGGCTGGGCCCCTCGGACCCCAGGCCACAGACTGACAGGGCACCGGCTTCTTCCACTGCTCCTAGAACTTACTGACTGGC
TGGGAGGTCCTCACAGCCTTCTCACGTCCCCTGGGGCTTCCAGGAGCCGTAGAGTTTCTGGGCGAAGCGTCCGGGACGGAGGCCCCAGGCGGCCCCA
GCCAATGGTCTGTGTGGTGATGGTGTGTGGGGTTAGGCCCAGGCGAGCTTTGTTTGGGCCACAATGTGCGTGGCCAATAAATAGATGCTTGAAAAGG
GCTCCTGTGAGGTCCGAGACACCGGACAACGGGCGGATAGAGACAGCCTTGTTGTTTACGGCCTCTTTGAGAGGCTGCTGCTGTTAAACCCTGGGAT
GACTGTGTCTTTCTTCTTAAAAATGCCATTGTTTTATTCCCGAGTCTTTTCTTAAAGAAAGAATTAAAATGACAATCAAAAGGGTTTGTGGCATTTA
CCAAATTAGACCAGAGAGGTGGCCGGGTCAGCCGCCGGCCCCGCGGTGTGTGAGGGAGTGACCGCCTGACCCCAGCTTGGGGCTGGGTGGGCCTGCA
AGACCCGTTTTGGCTCTGGCCTGGGCCGCCTCTTGGTGGTCTGCCCTCGAGCCTCCCGGGGACTCCGCACGGGTCTCAGCAGATGCTATCTAGGGTC
CACCTGCCTGTCCCCTGCCTAGTGGTGCCTCTGTCCCGGGGACACTGGGAGTAGCGGCTGCCCAGCCCATGTGTGTCTCGGAAGAGGAAGAAGCTTT
TTTGCCGTGGGACACCGAAGTTGGCAGGGGCCTCCCTTCTGTGTTCTCGGCCATGGCCTCCCTTGCACCCTGCCCCGTGTTATCCTTTGGGGGTGGT
GAGGTGTCCTCACCCGCTGTAGGGTGGAGGCCAGCAGCCCGCAGCTCTCTCAGGAAAATGGCTCAGAAACACCATCGAGGCCTCCAGAAGCCCAGCA
AAGAGAAAGCCCCTCCATCAAAATGAAACTCGCGTCTGCACTTTTCATTTCGAACTCCACGCCCTGAGTGAAAACCGCTTCCCCGCCAGGGGTGACT
GCCCTGGGATGTTGCTGTCTTCGGGCAGTTGTGGGAAGTTGGGCGCTGGCCCTTATTTGAGTAGAGACCATCTTAACTAGATTGGAGGCACACGTCT
CACAGCTGACAGACACACGGGGTGAAGTTACCCGAGGCGGAGTCCACTCTGCCTGATCAGCTAGTGACCAACGTAGCTGAGCCCAGACTCAGAAAAA
CCGTCCACAGCAGAGGCCCCTGCATTTTCTAGGGCGTGTTCTAGAATTTTCTTTGGTGGGTGGAATGTCCATCTGTGCAAATCGGGTGCGCAGTGCC
ACACACCAGTGACTTTTCGCGGAGGAGCGTGCTGCCTTTTTGGAGCTTCTGGCTGTGGGAGAACAGCTTTGTCCACCGGGGTAGCCTTGCAGGCAGC
TGTGGGGCCAGAGGAATGAAGGAAGGTCCTGGAGTCTAGCTGCATGTGTGACCCTGGAGTGGGTCATGGGCGAGGGACGGGCCGCAGGTGAAGAATC
CCTGGATGGAGCTGCCAGGCCCCTGGGGCTGAGAATTGAAGCTGGCTGGTGTTTTAGGTTGAACGTCAGGAGTCTTGTATCTCACCCCAGGCCTCTG
GCCTCAGTTTCCCCATCTGTACAGTGGGACTGTTTGTGCAGCCAGCCCGGCCAGCTTCATTTGCCATGATGAGAATTTATCTGAGGGGCGGGAGAGG
AAAGCCCTCCCTATAAAGGTACAGGCGCTAAAATGTCATGACCTCAGTGGTCCACCTAAAAGTCGTTCTGGCCTGGGTCATCGCCTGTCGTGCTATG
CCTTTGTCCAGCCCCTTCTGGTTGGGAGTTAAGTGGCACCTGTGCGGCACGTGGTGGGGCTGTGGCCCAGCCCTGCTCCTTGTGGAAGGTCTGTTTC
CTGGGCTGCCTAGAGACTTGGCTTGAAGCCCTAGCGTGGCTTCCTGGCAGTTGGGACACACACAGCCCCAACACATGGAGCCGGTTCTCCATCCAGA
AGCCCCCGGGCAGTAAGCAGCCACTTCAGGCTGCGTGGGACTTGCCCGTGGTGGAGCCTAGGAGAGGCCCCTGGCTGGGCGTGGCGTTCCAGATTTC
ACGGCTGCTCTTTCCCACTGACAGTGTGGTGTGGACGCTGCCAAGGGAGTCTGGAGCCCCAGAGGGTGGAGGTGCAGGACTTCCAGGAGCGTCCGTC
GCACTCCACCCGAGGGCGAGCACCTCAGTGGCCGCAGTGGGTGGATGCATGCTGTGCCAGGCTGATGGCTGGCCCCGGGGCACAGGCCTGAGCGGGA
GAGGATGGAGGGGAGGGATCAATGGTCCAGGTCCCCCTGGCCACCCAGCATTCATCCTCAGTCATGCACGGCCCAAGGCTTCGACAGCCATTGATCA
TGGAAGGCCAGGTTCACCTCAAGGGCTGCCACATGGAGAGGTTAAGTCTGAAAAGGCTGAAAAGGCAGGGTTAAAAGGGCCTCCTGTCCAGATCAGA
TGGCACTGAATTCCCCAGGGAGCTGGCACGGCCAGTGGGAACAGGCGGTGAAGGCGCTGTTGGACATGGGGACGGGCAGGGGGTGTGCAGGGTGGGC
GGGCAAGCATCTGGTGTCTTGTGGCTCCAGAGACCAGGTGGGAGGTGGAGGCGTTTGGTCCTGAGTGTCCTGACAGGTGATGGCAGCTCCCACATCT
CGCTCAGGTTCAGAGGAGGCAGCATGGGCCGAGGGACAGTTTTTGGCTTAGTCTTGCTCTTATAAAGGCTTCCGGGTCATGGCACCTGGGAAGGGGC
CCTCGCTGCAGGCCCCTTCTAAGGACCCCCTCTTCCCACCTCTCCCCACCCTCTCTCTCTCAGGACTGCCTCCGGGCCTGCCAGGAGCAGATCGAAG
CCCTGCTGGAGTCAAGCCTGCGCCAGGCCCAGCAGAACATGGACCCCAAGGCCGCCGAGGAGGAGGAAGAGGAGGAGGAGGAGGTGGACCTGGCTTG
CACACCCACCGACGTGCGGGACGTGGACATCTGAGGGCGCCAGGCAGGCGGGCGCCACCGCCACCCGCAGCGAGGGCGGAGCCGGCCCCAGGTGCTC
CACTGACAGTCCCTCCTCTCCGGAGCATTTTGATACCAGAAGGGAAAGCTTCATTCTCCTTGTTGTTGGTTGTTTTTTCCTTTGCTCTTTCCCCCTT
CCATCTCTGACTTAAGCAAAAGAAAAAGATTACCCAAAAACTGTCTTTAAAAGAGAGAGAGAGAAAAAAAAAATAGTATTTGCATAACCCTGAGCGG
TGGGGGAGGAGGGTTGTGCTACAGATGATAGAGGATTTTATACCCCAATAATCAACTCGTTTTTATATTAATGTACTTGTTTCTCTGTTGTAAGAAT
AGGCATTAACACAAAGGAGGCGTCTCGGGAGAGGATTAGGTTCCATCCTTTACGTGTTTAAAAAAAAGCATAAAAACATTTTAAAAACATAGAAAAA
TTCAGCAAACCATTTTTAAAGTAGAAGAGGGTTTTAGGTAGAAAAACATATTCTTGTGCTTTTCCTGATAAAGCACAGCTGTAGTGGGGTTCTAGGC
ATCTCTGTACTTTGCTTGCTCATATGCATGTAGTCACTTTATAAGTCATTGTATGTTATTATATTCCGTAGGTAGATGTGTAACCTCTTCACCTTAT
TCATGGCTGAAGTCACCTCTTGGTTACAGTAGCGTAGCGTGGCCGTGTGCATGTCCTTTGCGCCTGTGACCACCACCCCAACAAACCATCCAGTGAC
AAACCATCCAGTGGAGGTTTGTCGGGCACCAGCCAGCGTAGCAGGGTCGGGAAAGGCCACCTGTCCCACTCCTACGATACGCTACTATAAAGAGAAG
ACGAAATAGTGACATAATATATTCTATTTTTATACTCTTCCTATTTTTGTAGTGACCTGTTTATGAGATGCTGGTTTTCTACCCAACGGCCCTGCAG
CCAGCTCACGTCCAGGTTCAACCCACAGCTACTTGGTTTGTGTTCTTCTTCATATTCTAAAACCATTCCATTTCCAAGCACTTTCAGTCCAATAGGT
GTAGGAAATAGCGCTGTTTTTGTTGTGTGTGCAGGGAGGGCAGTTTTCTAATGGAATGGTTTGGGAATATCCATGTACTTGTTTGCAAGCAGGACTT
TGAGGCAAGTGTGGGCCACTGTGGTGGCAGTGGAGGTGGGGTGTTTGGGAGGCTGCGTGCCAGTCAAGAAGAAAAAGGTTTGCATTCTCACATTGCC
AGGATGATAAGTTCCTTTCCTTTTCTTTAAAGAAGTTGAAGTTTAGGAATCCTTTGGTGCCAACTGGTGTTTGAAAGTAGGGACCTCAGAGGTTTAC
CTAGAGAACAGGTGGTTTTTAAGGGTTATCTTAGATGTTTCACACCGGAAGGTTTTTAAACACTAAAATATATAATTTATAGTTAAGGCTAAAAAGT
ATATTTATTGCAGAGGATGTTCATAAGGCCAGTATGATTTATAAATGCAATCTCCCCTTGATTTAAACACACAGATACACACACACACACACACACA
CACACAAACCTTCTGCCTTTGATGTTACAGATTTAATACAGTTTATTTTTAAAGATAGATCCTTTTATAGGTGAGAAAAAAACAATCTGGAAGAAAA
AAACCACACAAAGACATTGATTCAGCCTGTTTGGCGTTTCCCAGAGTCATCTGATTGGACAGGCATGGGTGCAAGGAAAATTAGGGTACTCAACCTA
AGTTCGGTTCCGATGAATTCTTATCCCCTGCCCCTTCCTTTAAAAAACTTAGTGACAAAATAGACAATTTGCACATCTTGGCTATGTAATTCTTGTA
ATTTTTATTTAGGAAGTGTTGAAGGGAGGTGGCAAGAGTGTGGAGGCTGACGTGTGAGGGAGGACAGGCGGGAGGAGGTGTGAGGAGGAGGCTCCCG
AGGGGAAGGGGCGGTGCCCACACCGGGGACAGGCCGCAGCTCCATTTTCTTATTGCGCTGCTACCGTTGACTTCCAGGCACGGTTTGGAAATATTCA
CATCGCTTCTGTGTATCTCTTTCACATTGTTTGCTGCTATTGGAGGATCAGTTTTTTGTTTTACAATGTCATATACTGCCATGTACTAGTTTTAGTT
TTCTCTTAGAACATTGTATTACAGATGCCTTTTTTGTAGTTTTTTTTTTTTTTATGTGATCAATTTTGACTTAATGTGATTACTGCTCTATTCCAAA
AAGGTTGCTGTTTCACAATACCTCATGCTTCACTTAGCCATGGTGGACCCAGCGGGCAGGTTCTGCCTGCTTTGGCGGGCAGACACGCGGGCGCGAT
CCCACACAGGCTGGCGGGGGCCGGCCCCGAGGCCGCGTGCGTGAGAACCGCGCCGGTGTCCCCAGAGACCAGGCTGTGTCCCTCTTCTCTTCCCTGC
GCCTGTGATGCTGGGCACTTCATCTGATCGGGGGCGTAGCATCATAGTAGTTTTTACAGCTGTGTTATTCTTTGCGTGTAGCTATGGAAGTTGCATA
ATTATTATTATTATTATTATAACAAGTGTGTCTTACGTGCCACCACGGCGTTGTACCTGTAGGACTCTCATTCGGGATGATTGGAATAGCTTCTGGA
ATTTGTTCAAGTTTTGGGTATGTTTAATCTGTTATGTACTAGTGTTCTGTTTGTTATTGTTTTGTTAATTACACCATAATGCTAATTTAAAGAGACT
CCAAATCTCAATGAAGCCAGCTCACAGTGCTGTGTGCCCCGGTCACCTAGCAAGCTGCCGAACCAAAAGAATTTGCACCCCGCTGCGGGCCCACGTG
GTTGGGGCCCTGCCCTGGCAGGGTCATCCTGTGCTCGGAGGCCATCTCGGGCACAGGCCCACCCCGCCCCACCCCTCCAGAACACGGCTCACGCTTA
CCTCAACCATCCTGGCTGCGGCGTCTGTCTGAACCACGCGGGGGCCTTGAGGGACGCTTTGTCTGTCGTGATGGGGCAAGGGCACAAGTCCTGGATG
TTGTGTGTATCGAGAGGCCAAAGGCTGGTGGCAAGTGCACGGGGCACAGCGGAGTCTGTCCTGTGACGCGCAAGTCTGAGGGTCTGGGCGGCGGGCG
GCTGGGTCTGTGCATTTCTGGTTGCACCGCGGCGCTTCCCAGCACCAACATGTAACCGGCATGTTTCCAGCAGAAGACAAAAAGACAAACATGAAAG
TCTAGAAATAAAACTGGTAAAACCCCAGCGTGGTGCCTGCCTCTTTGCTTCCTGGGCTGGCCGTGAGCCAGGGACGCGTGTCCTGGTGCCCTAGAAC
CAGGGCAGGGTGGCAGGCTTGGCGGATGTGGGAGGCCGCAGCCTGTCCTGTGCGCTGTGGGAAGTTCAGCAGCATCCTGACCTCCATCCCCGGGATG
ACAGTCACGCCACCCGCCGTGACAACCAAGAATGTCTCCTGACACTGCCACATCCCCGGGGGTGGGGACAGAATCCAGCCAGGAGCAGGCACACCCC
TCCCAACTGGGAGGAAGCCCTCAGCACAGGTGTGTGAGGTGGGAGGCGGTGTCCTGTCCCCGGGAGGCTCCAGAGAATAATTTGCAGGCTGCCTGGC
TGGGTGAGCCCACCTCCAACCACGCGAGACAACAGCTCCGGCCTGGGTGACGTGAGCGGTGCCCATTGATGGGGAACATCTTCCCCCTCTTCCTTGC
CCCACCAGTTTGTCTTCCCGGGTTATTTGCAGATAGGAAAATAAATAAAGCCGGCATTCGTTAACCCTCTTCTGGCGCAAACTGCTGTTTGCTCTGG
ATGAATCATGGTCCTTTGGCGACGCCAGGCTCCGGGAGAGCAAAGCACCGTGTCAGGGCCATGATCCGGGGTGGCCTTTCACTGGGATCGTGGGGAC
CTGGAGGCCGCCTTATAGGACACCCATGACGCCCACCTCTGGATTTCAGGTGCACGTGACTGGACTTAACTTCAAACCCCAGGGTGGAGGCAGGTAG
TGGGAGTGCCCTGGGAAGGTGTCCTCGGACCTTGGTCACTGCTCCTGAACCCATCTGTGAGGCTGGTTTGTCCTCATCCCAAGCTAAGTGGAAGCTC
AGGTCCCAAGCCACCGATGGGTGCTACTTGTCAGCTGCAGGTTGAATCTCCGTGGCCTTTATGAAGCACCTGCTGTCTACCCTTCCTGCCTTGTAGA
GCACTCCTCCCAGGGCTCAACAGTGGGGCCGGGGTGGTCGGTGTGTTGGCTCCACAGGCGCCTGCCCTGGGAGGAAGGTGGGGTGTGGAGGGAAACG
CTTGGCCCCTGTAGGTCTCCACCAGCCTCTCCCCTGAGGGTGGGGGCTCCGGGAGCCTTCCTCGAGGGAGTCCTATATTGAGTGGGTGGGGGAGCCT
GCAAGGTGCCCCTGACAGGTCACATCAGAAAGAGCTCAAGGGACAGTCGGAGCCAGAGGTGACACTGGTGGCCACTCGGGTGGCTCACAAGGCCCAG
CTCCTCCTTGCTCCTGGGCAAATTACTCTGAAGGCAGGGACCAGGTCTGCACCATTGCGGCTCTCCAGTTCCAGGCAATGGCCAGGTCCTGTGTCAG
GGCTGGGGTCCTAGGGAAGCCATGTCCCCACCCCCGGCCTGCAGCTGGGTTTACATTCATCCCCCGAGAGCACATGGGTGTAGCAGGAGGCCTGTGC
AGAGAGCTCCGACCATCGCACAGGGCACCTTTGGTTGTTTCACGGAGCAGGCAAGGGAGCCATCGGATCCTGTTAGGTTTGAGCAAGGATGTGGGGA
AGAAGCTGGAGAGCCACTTTGCCATGCAGGGAGAGGAGCACATGGGTCTAGGGATCTACTTTAGTGTTTGGAAGGTTTTTTAAGATGAAAGAGGGAT
GTGTAGGCTGATAGGTCTGGCAGAGCCAAAAGGCAGCGACATGTCTACTGGGAGAGATGGAGCTGAGCGCGGGGCTCAGGCAGGGTGGCAGGGCAGG
GCCGGGGCCCTGGGTGGGTCAGGTGGGTTCACAGCCAAGTGTGTAGAGAGGGCTTGGGCCCAGAGTGAAGCAGTTGCAAGCTCTCCCACAACCCATT
CTCTCTGTCTCGGCATCTGTGGCATCCCGTGATGGGTGGGTCTGTACACACCCCACCCCTGGCTGTGCCACAATGGGGGTGTCTGTACACCCCTCAC
CCCTGGCTGTGCCACGATGGGGGGGTCTGTACACCCCCCATCCCTGGCTGTGCCACGATGGGGGGTTCTGTACATCCCCCAGTGATGGGTGGGTCTA
TACATCGTGGTTATGCCACGAGCTCCAAGGCTGTATCAGTCCGTTTTCACACTGCTAACAAAGACATACCCGAGACTGGGTAATTTATAAAGAAAAA
GAGGTTTAATAGACTCACAGTTCTACGTAGCTGGGAGGCCTCACCATCACGGCGGAAGGCGAAAGGCCCGTCTTCCATGGCAGCAGGCAAGAGAGAA
TGAGACTCAAGTGAAAGGGGAAACCCCTATAAAACCATCAGATCTGCTGAGACTTGTTCACCACCATGGGAACAGTATAGGGGAAACTGCCCCATGA
TTCAATCACCTCCCACCGGGTCCCTCCCACAACACGTGGGAATTATGGGAGCTACAATTCAAGATGAGATTTGGGTGGGGACACAGCCAAACCATAT
CAAAGGCATCGTCTGGCCACTCTAGGCCCTTGTTCCCAACTCTCAAACTCCACTGACATCACCTCTGTGCCTGCAACCCCTCCTGGGATTCAGTGGA
GACCTCGTCCCTTGTTGGAGTATCTGCGCTACCCAGAGGGTGATGGTAAAAACTGACCTTTGAGGAACTTCAGAGACAAAGCCTTCCGCAGTCAGCT
CTCCCTGCAGCCCCTTCGCAGAAGCCTGTCCTCACACGCCCGCCACCCCTACCTGCCCTGCCTCCTGGCCCATCTCCCTGCAGCCAGACAGTCCTCA
TCCATTCTTCATCCTCTGCCCCCAACCCCCAGCCTTCCTATCTCCCTTCAGCTCCGTCCAAGGTCCCTGGGACTCAGCCCCATCTCTCCCCAGCCTT
GACCCCAATAAGCTCGATGTCTTTGCCCAGGAGCTCCTGACACACCAGACTGCATCCAGCTTCCTGTTCTGCGCTTGGCCCACCGCCTCGGTCCACA
GGAACCTTCATCTCTGCTCTGACTGTAAGGATGGGCTCTCTGAGGGCTTCCCCACCCCACAGCAGGCAGGTGGTTCTGGGAGTCTGGGATTGTCATG
CCTGGGCACCTTCCTGCTCTGGCTGAGCCCCTCCAGGACGGAAATCTCCCAGATTTCTCTCTGCCTCCGTCTCCCCACCCTGGCATACAGTGGGTCC
TAGGAAGGGGGCCGAATGGAAGGGAGGTCGTGTCGGCTCCTACAGGGCAGCCCCAAGCTGCTGGGCTGAGGTGCAGAGCCATGGGTCCAGCCTGACC
CGCATGCCGGGAGCTGATTCCATGGCTGGAAGGGTCGGGGGTTCCCCAGGAGCCCAGACAGCACCTAGAGTTGTCACAAGGAGTGAAAGGCCCTGAG
GGGACAGAGGAAGGAGGCTGGGCAGAGTGGGCACGTGGACTTCGGACCGCGCTTGTGGGATAACAGTGGCTAGGGCTGTGCAGAGGGTGGTGCACTG
CCCATGGGAGTCCAGAGAAGCCAGGTCCAGTGGCAGTGGCATGCATCCGGCAATCCCTCCGGCTACCCTGCATGCAGCGTGACCCTCCTTGAAGCAC
CCCAGGAAGCAGTCACAGCCTCGCTCTGCCCAGCATTGGGGGCCTGGCCTCTGAATCTGGTGGGGAAGGCTGTGTTGCCTGCTGGCACCCGCTCTAT
CACCAGTCCCACCATAAGGCTAGTCCCCAAAGTCAGCACTGCAGCCAGGGCCAGCGAGGGCCAGCAAGGGCAGGCCTGTGCAGGGGCTGCAGCGTGG
GGTGTGCGTCCCGCACTCTGGGCCAGCCTCGCAGCTCACAGGGCTCTGTCATCCCAGGAATGTCTTTGATCAAGAGTTTATGCAAGACGAGGAAAGC
AAGCCCAGGACCTCTAATCCGTTCCCACAGTCCCCTGCCCGCCAGGGCCCCACAAGCCCAGCGCCACACCGCCAGGCCTGAGCAGACAATAGCAGGC
GGACGGGTGGGCGGGCAGCTCTGGGGCCGCTGGCCTTGGGGCCCACATCCGGGAGCATTGTCACCGCCACTCACGAGGGCACACAAGGAGGGCTGGG
GAAGAGAGAATGCAGAGCCCTCTGCTGAAGGGGCTTCGGTGGGCCTTGAGCCTTTCAAAGACGGCGGTGTCCATTAATCCTTTTAATTTGCACCTAG
CGGCAGCTGAGACAAGCCTCTCAACCGGCAGCCACTTTAAGAGCTGAGTGGTCTAACCCGAGGATCAGCTCCTATTCCAGACCCTGGGCCCTCTGAG
CCTGTCGAGGCAGTCCTCCTTGCCTTTGTTTAATCACGGGAGGAATCGCAGCTGGAGGTTACTGAGCACGCACTGTGTGCCTTGTGCTCAACACCGA
ACACAGTTTCTCTCTGAGTTTTGCAACGACCCCATGGGTTGGTGACAGGGAGGGGACACTCTGGTGGCAGCCACAGACACAGCCCTGCCCTCCCAGA
GCCTACACTCTCCCGCACACAATCATCCCATCTGCTAGGTCAGGGATTGGCAGGTTTTCTGGAAAGGGCCACAGAGAGAGGCTTCAGGCTTTGTGGG
CCACAGGTTCTCTTGCCCTGTGCAAAAGCAGCTGCAGCCGCTCTGTGAATGAGTGAGCATGGCTGTGTGCCAATAAAGCTTTATTTACAAAAATAGG
CAGCAGACTGGATTCAGGCTGAGGGTGGTAGTTTGCCGACCCCTGTTGTAGATGAGTAAACCGAGGCCCAGAGAGGTAAAGTAACTGAGCCAGGACT
GCACAGCTAGTGTGTGACCAAGCCAGCCTGGTGGGTCAGCCTCATGGAGAAGAAAAGGCTCAAGCTTCAAAAAGGGAAATGCACGGAGGCTTCATTG
GGCCATTTGCAGCCAGGCCCCACGCACACAGCTCAGGGCCCTGCTTCGCCAGCTCCACCTGTTTCGAGGCTCCCAGTAGGTTGCCCCTGCGGGCGGC
ACTGTGTCTTGGCTGCTGGCCTGGAGAAGGGCAGCCAAACAGGCCGGCAGTGGACATCTGAGGGTGACCAGCTGTTTAAAAAGAAAACTCACCGGCA
TGTATAGGCACACATTAAGCACACACGTTTTGGAGTAAAAGGCCCTGGGGTTGGATCTCGGATCTGCAGCTTTCCAGCTGTGCGGCCTCATTTCTCT
GGGCCTCAATGTTCACACCTATAACATGGGGAAATCCTGCAAGAACACAGCCCATGATGGGGAGTCGTCTCCATCTCCTACTCACGACAACGACCAG
CACAGAACGGGGGCTCCATAAATCTCTGTCAATAACTGAATTCTTTCTGGGGTGCTGAGGATTCTATGGCTCAATGTGTGTGAAGCACTGCTGAGCA
CCGAGCTTGGGGTGCAGTGATCACTCAGGGAACGCCATCATCCCCTCGGCGCATCCGCATAATCACCATCAGCATTCCATGCACTGCCCAGGTCTGG
AAGCACAGGCCTCCATGCCACGGCGGCCGCCTGGGTGGTGGCACCAAAGCCGATCTTACTTCCCTCCTTTGGCACATTAAGTAGACAGTTCTGGGTC
TTCTTGACACCACGGATGCCCCCTCCTGGTGTTGACAGCACCCAGACTTTGCTCCAGGGAACCACCATTCCCAGATCTGTGGTTTGAGTGGGACCGA
ACCCATCCCCAGCTCCAGGCCAGGTCTTCATAGGCTGAAACCCAACTGCACATCCACACCCACCAGAAGAGCAGCAAGTTAATGGATGGGTGAGAAA
TCAAATAGAGCCATTGAGTCTTGAGGAGACATTTTCTGGAGCTTCTGAAAAAGATAATGCTTCCCCCTTCCTTAGGATTCCCAGCAGGGAAACACAA
GCCCAGGGGTGGCACTGCCCCCCTGCAGCCCTAAGGGAAGACTGAGCTGCTCCCAGGACCTCACAGGGGAGGCTGAGCGTAAGGCCAGCCCTGAGGG
AAAGCAGGGAATGGGTCTCCAGACAAACTGCTGGATCAAGCCTCTCCTGAAGTCATCCCCCTTTTGTTCCAGAAGCCAATCATTGTCCTTCATTAAG
TCAGTTTGATATGGGCACTGTGTCATTTGGTTTTCAAAGACACTTAACTATTACAGCTTGTGTGTGTTTTCTTTTTTTTTTTTGAGACGGAGTCTCA
CTCTCGCCCAGGCTGGAGTGCAGTGGCCTGCTCTCGGCTCACTGCAAGCTCTGCCTCCCGGATTCACGCCATTCTCCTGCCTCAGCCTCTCGAGTAG
CTGGGACTACAGGCGCCCGCTACCACGCCCAGCTAATTATTTGTATTTTAGTAGAGACCGGGTTTCACCGTGTTAGCCAGGATGGTCTCGATCTCCT
GACCTCGTGATCCACCCGCCTCGGCGTCCCAAAGTGCTAGGATTACAGGCGTGAGCCACCGCACCCGGCCGCTTGTGTGTGTTTTCTACCTCTTCTA
GATCTAACATGTTATGATTGATATAAACAACAGGAGCGACTGACAAAGTTACCATGTGATCTTGGAATTTCAACATGCCTGTCTTGCTTAGCTGGGA
GTTCCACAGGGTCAGGGAATGACTCCTCTTGGGGCCACCAGTGCCCAGAAGTATGCCTAGAACTGCTCTGTCTGAAGGGACAGGTCCCTCTTCCATG
GCACACACTCTGTGTGTAACAGAGCACACGTGTGACCAAACTGACCTGGAGAAAGGGCCTGACCACATCCATATCCCAAGTTCTGAGGCCGGATAGT
GCCTGCAGGGGCTGAGACCAGGGGAGAGGCTCAAGCCAGCCTTCTCTGGTGGACCCTGACTCAGTCCTCTGTGCAGGGCAGCTGCGCCTCCCAGAAG
GCAGAGGCCTCTTGGAGAGTGAGCCTTGCGGTCACAGCGCCTTTCGGGGGCTCCCGCCACTTGCCCTCAGTGGCGGCTGAGACCTGGGGGAGTCCAG
GCAAATCCCTGAGGAGGCCCCACATGCAAGGCCAGAAGTGTCTGGATGGTGTGGCCGGCACCCTTACCCTCCAGACCAGCAAACGAAGCCCAGGCAG
GGAGAGGGGCCTTGTAGTTTTCTGTGGCTGCTGTAATGAATTTTCACACACTCAGCAGCTTAAAACAACCAACATTTCTCTCATAGTTCCAGAGGCC
AGCAGTGTCTGCAGTGCCCGCTCTCTCCCAGCTTCTGGTGGTTTCGGGCGACCTTCGGCTCTTCTCAGCTGGTCCATGTGCA
HUMAN SEQUENCE - mRNA
GCAGTAGCAGCGAGCAGCAGAGTCCGCACGCTCCGGCGAGGGGCAGAAGAGCGCGAGGGAGCGCGGGGCAGCAGAAGCGAGAGCCGAGCGCGGACCC
AGCCAGGACCCACAGCCCTCCCCAGCTGCCCAGGAAGAGCCCCAGCCATGGAACACCAGCTCCTGTGCTGCGAAGTGGAAACCATCCGCCGCGCGTA
CCCCGATGCCAACCTCCTCAACGACCGGGTGCTGCGGGCCATGCTGAAGGCGGAGGAGACCTGCGCGCCCTCGGTGTCCTACTTCAAATGTGTGCAG
AAGGAGGTCCTGCCGTCCATGCGGAAGATCGTCGCCACCTGGATGCTGGAGGTCTGCGAGGAACAGAAGTGCGAGGAGGAGGTCTTCCCGCTGGCCA
TGAACTACCTGGACCGCTTCCTGTCGCTGGAGCCCGTGAAAAAGAGCCGCCTGCAGCTGCTGGGGGCCACTTGCATGTTCGTGGCCTCTAAGATGAA
GGAGACCATCCCCCTGACGGCCGAGAAGCTGTGCATCTACACCGACGGCTCCATCCGGCCCGAGGAGCTGCTGCAAATGGAGCTGCTCCTGGTGAAC
AAGCTCAAGTGGAACCTGGCCGCAATGACCCCGCACGATTTCATTGAACACTTCCTCTCCAAAATGCCAGAGGCGGAGGAGAACAAACAGATCATCC
GCAAACACGCGCAGACCTTCGTTGCCTCTTGTGCCACAGATGTGAAGTTCATTTCCAATCCGCCCTCCATGGTGGCAGCGGGGAGCGTGGTGGCCGC
AGTGCAAGGCCTGAACCTGAGGAGCCCCAACAACTTCCTGTCCTACTACCGCCTCACACGCTTCCTCTCCAGAGTGATCAAGTGTGACCCAGACTGC
CTCCGGGCCTGCCAGGAGCAGATCGAAGCCCTGCTGGAGTCAAGCCTGCGCCAGGCCCAGCAGAACATGGACCCCAAGGCCGCCGAGGAGGAGGAAG
AGGAGGAGGAGGAGGTGGACCTGGCTTGCACACCCACCGACGTGCGGGACGTGGACATCTGAGGGGCCCAGGCAGGCGGGCGCCACCGCCACCCGCA
GCGAGGGCGGAGCCGGCCCCAGGTGCTCCACATGACAGTCCCTCCTCTCCGGAGCATTTTGATACCAGAAGGGAAAGCTTCATTCTCCTTGTTGTTG
GTTGTTTTTTCCTTTGCTCTTTCCCCCTTCCATCTCTGACTTAAGCAAAAGAAAAAGATTACCCAAAAACTGTCTTTAAAAGAGAGAGAGAGAAAAA
AAAAAAAAAAAAAAAAAAAAAAAAAAAAAAAAAAAAAAAAAAAAAAAAAAAAAAAAAAAAAAAA
HUMAN SEQUENCE - CODING
ATGGAACACCAGCTCCTGTGCTGCGAAGTGGAAACCATCCGCCGCGCGTACCCCGATGCCAACCTCCTCAACGACCGGGTGCTGCGGGCCATGCTGA
AGGCGGAGGAGACCTGCGCGCCCTCGGTGTCCTACTTCAAATGTGTGCAGAAGGAGGTCCTGCCGTCCATGCGGAAGATCGTCGCCACCTGGATGCT
GGAGGTCTGCGAGGAACAGAAGTGCGAGGAGGAGGTCTTCCCGCTGGCCATGAACTACCTGGACCGCTTCCTGTCGCTGGAGCCCGTGAAAAAGAGC
CGCCTGCAGCTGCTGGGGGCCACTTGCATGTTCGTGGCCTCTAAGATGAAGGAGACCATCCCCCTGACGGCCGAGAAGCTGTGCATCTACACCGACG
GCTCCATCCGGCCCGAGGAGCTGCTGCAAATGGAGCTGCTCCTGGTGAACAAGCTCAAGTGGAACCTGGCCGCAATGACCCCGCACGATTTCATTGA
ACACTTCCTCTCCAAAATGCCAGAGGCGGAGGAGAACAAACAGATCATCCGCAAACACGCGCAGACCTTCGTTGCCTCTTGTGCCACAGATGTGAAG
TTCATTTCCAATCCGCCCTCCATGGTGGCAGCGGGGAGCGTGGTGGCCGCAGTGCAAGGCCTGAACCTGAGGAGCCCCAACAACTTCCTGTCCTACT
ACCGCCTCACACGCTTCCTCTCCAGAGTGATCAAGTGTGACCCAGACTGCCTCCGGGCCTGCCAGGAGCAGATCGAAGCCCTGCTGGAGTCAAGCCT
GCGCCAGGCCCAGCAGAACATGGACCCCAAGGCCGCCGAGGAGGAGGAAGAGGAGGAGGAGGAGGTGGACCTGGCTTGCACACCCACCGACGTGCGG
GACGTGGACATCTGA

[0296] TABLE VI

MOUSE NOMENCLATURE
ICSGNM Ccnd3
Celera mCG15576
HUMAN NOMENCLATURE
HGNC CCND3
Celera hCG16683
MOUSE SEQUENCE - GENOMIC
NNNNNNNNNNNNNNNNNNNNNNNNNNNNNNNNNNNNNNNNNNNNNNNNNNNNNNNNNNNNNNNNNNNNNNNTGCTTCTGCCTCCCGAGGGCTGGGAT
AAAGGCGTATACTACCACATACATCCCAAAATACATATAAAAATTAATAGAGCTAGTTGAGAAGTCTCTCCTCTCGTGATAGTCTCTGATTTGGGGA
TGACACCTTTCTTGAATATTTGTATCAACCTATTTGCTGCAGTGTAGGTGAAGGCTAGCCCAGTGTGTAGATGAAGTCTAGCCCAGTGTGTAAATGA
AGGCTAGCCTGGTGTGTAGGTGAAGGCTAGCCCTGTGTGTAGGTGATAGAATTGAACTTTTACTTGAAGAGTGAAAGTGATTTAAACAATGAGGAAG
CGGTAATGCTTTACTCCTCACAGAAAGTCCAGAGGTAGCCTCAGGACTGGTTCAGTAGCTTAGCAGTGTCACTCAGGCGAGGGATTCATTCAGATAA
TCCACTAGGCCCCTTTCTTCATTGCAGAGATGGCAGAGGTGGCCCCAGCATCATAGTAGAGTGGTTACGGGCATAGCTTTGTGGTAGCATTTTTCTG
TGATCCCTTTGGTTGGGAAGCTGAGGCAAGAACATTGCCAGCCTAGGCTACATGGTGAGAATCTGGTCAGGCAGGGCACACAGCAGAGTCCTGTCTG
AGAAGGGTCAAAACAAAACAAAAGCGCAGGGCATATAAAACAGACCTTGTTTGCTAGAGCGTTTGCCTAGTTGCCCACCCTGTAGGAAGCCCTGGGT
TCCCTCCCTAGCAGCTCACGAGCTGAGCATAGTGCTACACACTATAGTGTTCCACCATTCCTGCACTGGGGAGGTAGAGGCAAGAAGATCAGGAGTT
CCAGGCCCAATCAAGTTTAAGTCTAGCCTGAGGTCCATGATTCCCTGCCTCTAAGAGAGATTTGAGGTTATCCTCAACTGTACATCACATGAGAGGC
TAGCTTGGGCTACGTGAGCCACTATCTGAAGAAAAAAAGAGCTAGGAAGATAGCTCAGTGAGATGGTTCAGCAAGTAAAAATGCATGGTGGACAAGC
TTAAAAACCTCTGCTCCGGGGCTGGAGAGATGGCTCAGTGAGTAAGAGCACTGACTGCTCTTCCGAAGGTCCTGAGTTCAAATCCCAGCAACCACAT
GGTGGCTCACAACCACCCGTAATGAGATCTGACGCCCTCTTCCACACAATAAATAAATCTTTACAAATAAACAAACAAACAAAAACCCCTCTGCTTG
GTCCTGGATCCTACTGTGGAAGATGAGGGACACACCAGGAGGTTGTCCACAGGTGCAAACACACACATATGCACACCCAATGTAATTGGAACATTTC
AAATATATCTGAGCATGGTGGTAAAGTGCCTTTAATCCCAGCACTCAGGAGGCAAAGGCGGGGCGATCTGTGTGAGTTTGAGGCTAGCCTGGTCTAC
ATAGTGAGTTCCAGGACAGCCAGGGCTACACAGCAGTGAGGCCCTGTCTACAAATAAATAGACAGACAGATAAATAAATAAGCGATAAAGTATAACA
GATCAGTTACACAGTAAGGCGTATAACAGATCCAGTAGTGTTACACAGTAAGGCCTGACTGATAGATAGACCGGCATACAGAATGATAAAATATAAT
GGGGCTTGTAAGATGACACAGCAGGTAGAGGTGCTTGCTGCCAAGATCTTCAGAACCTATGTAATGAAAAAAGAGAACTAACTCTCTCAAGTTGTCT
GCTGACTTCTACGTACATATGCATGGCATACACACGCATGCGGAAACACATACACATTTAAAATGAAATAAACCAGTTATAATGGGGAGCTAGCTAT
AGCTCAGTAGGTAGAGTGCCTGTGTAACCTGTAGGATACCCTGGGTTCAGTCCACAGCATTGTATAAACTGGTCAAAAGATGATCATGGTTGTAATC
CTCGAATTCAGGAGATGGAGTTAAAGAGAAGTTGGATGCCGTCTTCATCTACAAAGTGAGTAAGAGGCTAGCCTGGGCTGCATGAGACCTTATCTGA
AATATAGTAATGGATATTGCTATCTCAGTTTTGCAGTAGGCACAAGGTTGTATATTCCTGCCGTCTCAGAGCCTCAGAGACAGAAACAGGATGGACA
TAAGTTTAGACCAGACGTATTCACTGTGAATTCTAGGCCAGGTAGACCTAGCAAGAGTTGCCTTAGAAACATCAACAAAACAGCAGCAGCAGCTTTT
CATGAAACAGATTCCAGTCTGATGTACACACACATATCAAACCGAGCGGCTATTTGTTCAATTCTTTTTTGTTGTTGTTGTTGTTGTTGTTTGTTTT
TTGTTTTTTTGAGACAGGGTTTCTCTGTGTAGCCCTGGCTGACCTGGAACACACTTTGTAGACCAGGTAGGCCTCGAACTCAGAAATCCACCTGCCT
CTGCCTCCCAAGTGCTGGGATTAAAGGCGTGCACCACCACGCCCGGCTCTATTTGTTCAATTCTTGAGCATGAGGCTAGCTCTATCAGGAGAGTTCT
GACCTAGAGGGGCATGGGACTTGTCATTTCAGAGTGTGGCAGCCTCCTTCTGAGTACCAGGTACCTGGATTGCTTAGTGGCTTGTTCTATCGGAAGC
TATTGTACCTGCCCACAGCAAGGTGGAAGTGTCTAAGAACTGAACCGATCCTGAGTCTGCCTACAGAAGCCTTCAACCAATGGCAGCTGAGAATGTG
GAGACAAACATCTTGCCTCATTGTGCCTCAGCTACAATCATGATACAGACAGTTGTAAGCTGCCATGTGGTTGTGGGAATCGAACCTGGGTCCTCTG
GAAGAGTAGTCAGTGCTCTTAACTGCTGAGCCATCTCTCGAGCCCTTGCCCAGCCTTTTTTCTTAAAATTGTATTTTTAAAATTTATTTTCTGTACA
CAGGTGTGTGAGTGTGAACATGTGGATCCTAGGGGTTGAAATCAATTTGCCGGGGTTTGTATGGTGCCTTCTCACCAGCTTTAGAGTTTCTTGATTA
CTAGGGAAACCTTCCTGGAAGCAGGATGCTACTCAGTATTTTGATCACTCATAAGACATTTCATTGTGAAGTGGAAAGAAAACCTTCGTATGTTGTT
TTGTCTTGTTTGTTTAATATTATATTCTACAGAACATTATATACAGATGTCATAAGGACAATAAGGACATAGTTTATTATTTATTTACTTATTTTTG
AGAAAGGGTCTCACTAAGTAGCCCTGCCTGGCCTGGAACTCACTATGTAGTCTAGGTTGGACTTGAACTCACAGAGAGCCACCCACCTCTGCTTCTG
GAATGCAGGGACTAAAGCCATGAGCTACCATGCCTAGCCAGATTGTAGTTTTGTTTGTTTTTGTTTTGTTTTTCAAGACAGGGTTTCTCTGGGTAGC
TTTGGCTACCCTAGAACTCACTCTGTAGCCCAGGCTAGCCCCAAACTCACAGAGGTCCATCCATCTCTGCCTCCTGAGTGCTGGGATTAAAGGCATG
CATCATCACACCAGCTGAGTCTTTTTTTGTTAGGAAAATCTCCAAGTTGTCTATCCTTGAGCTTTGTGGTATTCTTTTCCTGAGACTGGGTCTCATG
TAGCCCAGGCTGGCTTCAAACTCAGCGGATAGCTGAAGATGCTCTTGAGCTTAAAACTCAGCTTCTTTATTTTCTTTATTTACTTACTTTTATTTTG
AGGCAGAGTTTCTCTGGTGTAGCCCTGGCTGACCTAGGACTCTATTTGTAGCCCAGGCTGGCCTTGATCTCACAGAGATCTGCCTGCCTCTGTCTCC
TGAGTGCTGGGCTGAAAGGTGTGTACTGTTGCACCAGGCTAGCGGCTTTTTTTTTTAAAAAAAAGATTTATTTTATTTATGTATATGAGCACATTGT
TGCTGACACACCAGAAGAGGGCATCAGATCCAGTTATAGTCTGCTGTGAGCCACCATGTGGTTGCTGGGAATTGAACTCATGACCTCTAGAAGAGCA
GACAGTGCTCTTAACCATTGAGCCATCTCTCTTCAGCATGGCCTTTTTTTCTTTTCCTCTTTCTTTTTCTTTTCTTTTCTTTTCTTTTCTTTTTCTT
TTTCTTTTTCTTTTCTTTTTAAAGGCTTAATAACTATTCTTTTTTTTCTTTTCTTTTGGAGACAAGGTCTCATTTTTAGCTTAAGTTGGCCAGGAAT
TCACTCCATAGCCTAGGCTGACCTTGAACTTGGGGAGATTCTCAAATTGGGATTCCAGGTCTGTGCTACCAGGCCCAGCTTATACAATTGTGTTTAT
TTCTCAATTTAAAAAAAATCCATTTTTATTTTATGCGCTGGGGTATTTTGCCTGCATGTATTTATGTGTACACGCATGCCTGGTGCCTGCGGAGGCC
AGAATGAGCCTCAGAGCCCCTAGAAATAAAGTTACAAATAGCTGCACAGGTGCTGGGAAGTGAACCTGGGGCCTCTGCAGATAGCAGCAACTGCTTT
TAATCGCAGAACACTCTTTCTAGCCTTTAATTTCTCAATTGAGGTAAATGTTATTAAAAGTTATAAAAATGGGCCATAAAGGGTATGTGTTCTTGGC
ATACAAGAAGCCCAGGGTTCAGCCTCAGCCACTATTATTATGTTGATAGTTGTAAATACCCATACACGAGGACAAATTTGGCTTTTACAAAGCCAAG
CCATAATCAGTTGGACAGTGGTGGCGCATGCCTTTAATCCCAGCACTTGGGAGGCAGAGGCAGGCAGATTTTTGAGTTCGAGGCCAGCCTGGTCTAC
AGAGTGAGTTCCAGGAAAGCCACGGACTACACAGAGAAACCCTGTCTCAAGAAAACAAAACAAACATCCATAATCACAACTCAACTACCTGGGCACC
CACCCCCCTGCATCCCTGCCTCCCCTGCCCCTCCACACACACACTGTGGCTCTGGGGATTGAACCTAGGGACTAAATGAATTCCGAATAAGTGCTTT
CCCAGTGAGCTACCTCCAGCTCAGAGAAGAGTGTGTGAGAGAGTGGAGAGGGTAATTGTTAGTATATAAGTAACCTTTTTGCTTTTGCTTTTTTTTT
TTTTTTTTTTTGAGGCCGAATCTCACTATTCAGTAGTCCAGGCTGTCCTTGAACCTGCAGCAATCCTCCTGCCTCAGGAGGATGAATGTTACGATTA
CAGGTGTGGGCTACCACAATTGGTTTAGAAACTACCACATTTGCATGTTCCCTTTGCCCCGGATACCGTGCAAGATACTTTAGGCCCTTTGGTCATC
AAAACATCCCGGTAGGGTACGGACTTTGTTATTACCCAACTGGATGAAAAGAAAAACAGACACGAGAGAACCAGTAGGTTTCAAACTCACTCCAGAG
TGGCCTCATTCCGGTGTTGTGTCCACCTTCCTATTTAGGGGTGGTATCTCCTCATCTTAATCCCCTACCTGGTTTCTCTCTCTCTCTCTCTCTCTCT
CTCTCTCTCTCTCTCTCTCTCTCTCTCTCACACCTCACACACACACACACACACACACACACACACACACACACACACACAGTGGGTCTGAGAGTAA
GGGTGAGGTGAAGGCCCTCACCTGTCACTCTGTTCCCCTTCTGGGTCTCAGTTGGAGAGATTCCAATGATAAAGAGGTGAGGGAGTGGTAGGAGGAA
GGACGCTCAGAGTCCTTCATCCTCTGGCCTTTCCTTAGGGCTTGTGACAATTACATTCCAGCTGTCCTCTAATTTACCATTTCATTGAGTAACTTTG
TAATTGGATGCACCTGGCTTGAAGCACTTTGATTTATTCCCCCTGGTTATGGGGAGTGTGAGCTGGGCTGGCTCTTTCTTTCCCTGTCTCTTTGTCT
CTCTCCTCCTCCACTCCCCTCTCCTCCTCCTCCTCCTCCTCCTCCTCCTTCTTCTTCTTCTTATTCTCTCTCTCTCTCTCTCTCTCTCTCTCTCTCT
CCCACCGCTCTTGCTTGTTTGTTTGTTTTTTGGTAGTTGTTTGTTTTGTTGTTGTTGTTTTGTTTTTGAGGCAGTCTCACCTAGCCCAGGCTGGCCC
TGAATGGCTGCCCACCTTGCTTCCACCTTCTAAGTGTTGAGATTCCCAGTGTGTGTGTGACTCCTCCAAGTTTTGCCCAGTTTTTTATGCAGTGCTG
GGAATTGAACTTAGAGCTTCTTGCATCTTAGCCTAACACTACCAACTGAGCCTCATTCTCAGCCCCTTTTTTGTTGCTTTGTTCTGTTCTTCGAAGG
GCAGTGATGGTGAAGCCGGATAAGCAGACCTCTCTGGAGTTCTCCCGGGGAGGCCTCCTGCTCCCTCAGCAACCACCCTTCATGTAGCTGGCCAGCT
CCTTGGCCCTGAAGGCCCAGGACAGTGGGGCTGTTGACCAGTTATCCAAGAAACCTTCTAGGACTCAACTGTCTCTCTCTCTGGGTGCCCTTTCTCA
GTAGGTCAATGAGGAATAGATCAATATACATCCTTGGGACAGCACAAGAGGCAATGGAATGAAGTGGTCAAGAGTTGGTACTGACTGCTGCTTTCAG
ATCTCTGTGGCTCAGCACCGCCCCTGCGCCTTTGAGTTCTAACTCAGTGTGCTTAATTTTTTGTTTCCTTCATTCTGTCTTCCAAATTCTTGAGCAT
GTTTGCCCCGGCACTCTGGGATTTCACCCTGTTTGTTATTCTGAAGACACTCTCATCCTTTTCTATTCCCATCGGTGCATATTTCCATTTATCGGTG
TTAGATTGTGAATGTCAGCTCAGAAGNNNNNNNNNNNNNNNNNNNNNNNNNNNNCCTTTCTTTATATAAGGATGATGACGTAATCACAGGTAAAGAT
AGGAGCTGAACCAAGTGGATTCTGGGAATATGGTGGCTGTTGTCTTGGCAACAGGTGTTTGGGGTCCTGCCTATGTGATGTCACGGGTTTTGGAGGT
CCTGATACCAACAGTCTCTCTCTCTCTCTCTCTCTCTCTGTCTCTCTCCCCCCGCCTCTTTCCGCCACCACCTTGCCACTCTCTCTCCTAATAAACC
TCAGGTGGAACTGTTTGGCCTGGTGCAGTCCTTCTGAAGCTGACATTCACCAAACAGTTGGCAACAGGAGGTCCTGATACTAACACAAAAGGCAAGG
CTTTCTCTCCTCCTCAGTTCATCTCTCTTCCTGGAAGCTTTCTTCCCTGTTTGTTTGTTTGTTTCCCAAACTCTAATAAAATGGTCTTCAAGCTTAT
TAAAACAAAAAGAAGCCATGGGGGTTAGAAAGGTAGCTCAATGGTAGAGCGTACCTACCTAATATGACCAGCATCGATTTCTCCTGATGTCCACCCA
TGCAAGGGCATCAACTCTGGAGCTAAACCAGACTGCAGCCTGCTTTTACCAACTCCGAGCTATGTGACCTCTCCGTGGTCACTTAGCCATCCATGGT
GAGTATTAGCACCCAGCCCCTATTACACAGGGCAAAAATAATATACTTTCTGTAAGGCTGTTGTGAAGATAAAATGATTTATTACCTCTCAGATATG
TTCAGTTCTTGGACATGGTATGTGTACATGAAGACCTGTTACTGTTGTTGGTACTCACAGCCAGTTGTTGTGTCCAGAGGATACACAGCTACGCGGG
ACTTTATCTCTGCCCTTCAGGACAGGAAGTTTGGTGGTGCATTCCTGTAATCTCAATATTTGAGAGGAAGAGGCAGTAGGATTGTTGCAAGCTGGGG
GCTATTCTGGTCTACCTAGAGTCAGAGCTACATAGAGTCAGGTCTATAAATGTCAGAGCTACATAGTGAGAACCCGTGTCATAAAACTAACAGAATG
TTAGTGTGGGTAAGGCATGCAATTGGGAGGTAAAAGCAGGAAGATCAGATCCAGCCTCAGTTATATACTAAATTCAAAGCTAGCCTGGGTGCCGTAA
GACCCTTGTCTCAAAAAGTGTCCCCTCCCTCATTCGTTAAGTGTAAAGCTTGATGTATAAACATGGTGGTACGAATTTGTAATCCCAGCACTTGGGA
AACTGAGGCACGAAGCTGGAGAATTCGAGGTCAGCTATAAAATAAGACAAACTGTTTCAACGAGGAGAGAAACCACTGGGGCAGTGACCTTCTGTGA
CTGAAGCAATCCCATCATGCCTCCTTCCTGTATGAAAAGCCATCCCCATATGTGGATTCTGACCCCTTGCTCAGCGCAAGACTAGTGTGTAGACCAG
TGTGTAGACTAGTGTGTAGACCAGTGCATAGTCCAGTGTGTAGACTAGTGTGTAGATGGATCTCACTGCTTATATATTGTCCTGTGCTTTCCTGGGG
CTCACTTGGGCTGAGCAGAGAGAGCAGTGTCTTAGTGGTGGGCTTTCTTCTTTCTTTCCCTCCTTTCCTCTTTCCTGCCTTCCTTATTACATCCTTT
TTTCCCTTGATTTTTGTTTTTGAGACATAGTCTCATGATATTAGCTCCTCCTGACCTAGAACTCTTATTTAGACTAGGCTGGCTTTGAACTCAAAGA
AATCTGCTTGCCTCTGTCTTCAAAGTGCTGGGATTAAAGGGGTGCTCTGTCATGCCTGTCTTCCTTCCTTCCTTCCTTCCTTCCTTCCTTCCTTCCT
TCCTTCCTTGTTATTTGAGTCATCTGACATGGGTCTGGCTGGCCTGGAATTCTCCATGGGCTATTATCATTTGGTTTGCTTGGTTTTGTGATAAAAT
CTTATATAGCCCAGGCTGCTCCTGAACTCATTAGGAAGCAGACAGTGACCTTAATCTTCTGATCGTTTCTGGGTTCTGCAGTGCTGGGGATTGAGCC
CTGGGCTCTGAGCATGCTAAGCAAGAGCTCTACCACCTGAGATATATCTGCAGCCCACCCCCTGCCACCGTGTGTGTGTGTGTGTGTGTGTGTGTGT
GTGTGTGTGTGTGTGTGTGTGTGGAGAGAGAGAGAGAGAGAGAGAGAGAGACTCTAGGCAGGCCTTGAATTGTCTGTATAGTGGATAGTGGATCCTG
GTGTTAAGCCAACACTTCCCTGGGTCTGAGATTACTGGCTTGCTCCACCACAGCCAGCACCAAATGGCTTTTTATATGCTGATTTTGACCAACACTG
CTCACACCTCCGTTGGTGCAACGCAGTGTCCCATTCAGCAGACCTGAGAAACTGCATTTCTTCTTTTGCTTTTTATTTTCGTTGTGTATGTGCATGA
AGGTGTGTGCGCACATGCTACATACAGCCTTGGTGTAGAAGTCAGAGGACAGCTTATGGGAGTTGCTCTCTTCTCTTCCATCATGTGGGTCCCAGGG
ATCACACTCAGGTTGCCAGACTTGATGCCAGGATAGTTTACCCTCTGAGCCATTGAATCGGACAGAAACTACATGCTCCCAGATGCTGCTGCAGATC
TGCGCAATTCGTTAAAGTAGACGAGATTCTAAGTCAAGTTTCCCGACGGACCAACAATGAGATCTTTGCAGCTACTATTGTGCCTCAGTATCATGGT
CTGCAAAATAAAGCCCAACTCGAGGCCATTCCTAGAAGCCACTTTAGGGTAGGAGTGACCCAACTATGTACAAAGTTATGACCACATTCCCTAGAGC
AATGAAATATGACGTATACACGAAGGAATAACTTTTGGCGCCTAGTTCTTTCCTGGGTGGCTAGAATCGCGACGGGGCCCATTGATGGGGAAGAGGG
CACCCTTCCAGAAAGTTCTCTCTACCCTCTTGGTCAGAAGGGACCCGAGGGCCCGGAAGCGTGCGGGCCGGAGCCCAGCGGACCAATGGGGCTGCGG
GGAGGGNNNNNNNNNNNNNNNNNNNNNNNNNNNNNNNNNNNNNNNNNNNNNNNNNNNNNNNNNNNNNNNNNNNNNNNNNNNNNNNNNNNNNNNNNNN
NNNNNNNNNNNNNNNNNNNNNNNNNNNNNNNNNNNNNNNNNNNNNNNNNNNNNNNNNNNNNNNNNNNNNNNNNNNNNNNNNNNNNNNNNNNNNNNNN
NNNNNNNNNNNNNNNNNNNNNNNNNNNNNNNNNNNNNNNNNNNNNNNNNNNNNNNNNNNNNNNNNNNNNNNNNNNNNNNNNNNNNNNNNNNNNNNNN
NNNNNNNNNCCATCGCAGGATGGAGCTGCTGTGTTGCGAGGGCACCCGGCACGCGCCCCGGGCCGGGCCCGACCCGCGGCTGCTTGGGGACCAGCGT
GTCCTGCAGAGTTTACTCCGCCTGGAGGAGCGCTACGTGCCGCGAGCCTCCTACTTCCAGTGCGTGCAAAAGGAGATCAAGCCGCACATGCGGAAGA
TGCTGGCATACTGGATGCTGGAGGTAAGGCCCGAACGGGTCCCCTCTCCTCACCCCACCCCCACCCCCGGCTCTGGGACAAATTGAACTTTCCCTGT
CGGATCTTTGCGATCCCGACCACAATCTGCAAGATGCTTTGGCGGCCCAGACTACTGGGGCCTGGCCTTTTCACACAGGCGCCCTAAGCAGCTGCCT
GCGTTCTGTCCCTTTCCTTTCCCCAATCCTGATCGGCTTCTTCTGTGATTTCCAGTCACTTGGCACTGTAACTAAACTTCACTTTGGGTCGGGAAAG
CGGGCTAAGGGCCACTCTTTCCCCAGTGGCTTTCCTCGGTGTCTCCTGCTTCCTTCTTCACCCGGTGCTCTCTGGAGGGCGCGTTTGGAAAACCCTG
GCCTCGGCCGCCTTAGCCCCAGAACTGGTTCCTGTGTCTATCGCGGGGTTCTGGCGGGGGAAACTGGTGGGTGGGGGTGGCGCAGGCTCGGTTCCGG
TCCACAGGGAAATGAAAAGTGCGGGAGACCGCGGCAGGAGTTCCCTCCCTTCCCCCTGGGAGTGTGTGTGCAGTGGGTGGCGGTAATGAGGGTAAGG
TCCCAATTCTCTCTAGGTGACCCTTCCGTCCCCCTTCCGCTCGCCGTGGGGGAGGGGAGTCTGGAATCCTTCGTGAGCATGGGCTTCTCTTTTACAC
CCCCTACTCCGGGGTGGGGAAGAGACCATGCAGAGGAAGTGGGGGGGTCACCTTGGGGAGGGCACATCCTCCTCGGTTATTGATACTTGTCGCTCTA
AGTTTATCCCTTCTCGGTTTATTTTTTGCTTCGCATTCCACTCTCCCTCCACCCCCCACCCCCACTTCTCCACGCTGCCGTGTTTCACTTGGTCCTT
CCCTAGCAATGACTCGTGCGCCCTCCCTCAGGTGTGTGAGGAGCAGCGCTGCGAGGAGGATGTCTTCCCTCTGGCTATGAACTACCTGGATCGCTAC
CTGTCCTGCGTCCCCACCCGAAAGGCGCAATTGCAGCTTCTAGGTACCGTCTGCCTGTTGCTGGCCTCCAAGCTGCGCGAAACCACGCCCCTGACTA
TTGAGAAGCTTTGCATCTATACGGACCAGGCTGTGGCTCCATGGCAGTTGCGGGTGCGTGCGGCCCTCCTCCCCCCCCCCCGCCCCTCCACCAAACA
TACGATCGCCCTATGTACTAGTAAAAGAAAAGCCAAGCTCACTCCCTCACCCACCAACCCTCCCTTCGCCCCTGGCTGGTATTTTGGGACAAAGGCC
TTGTAGTGTGGTCGTGGTGCTTCGGTTGCAAGCTTAAAACTAAATGAATCCCTTTCCTCTGGCCGCAGTGGGGTTCCACTCCTAACTCGCCCCCCCC
CCCCAATAGCAACAAGTCCAATTGCGGGTCTATACACCAGTACTTTGCCTCTGGGTTTACACAGCCACCGTGAGTTATTTATTGGCAGCAGCAGGGC
ATGTCTGCACACCCCCACCGGAGTGGAATGTGCTTCACGTGGGGGAGGGGGCTGCCTTGCATGAGCCTTTATCCCCGTGTGGACTTTGTGATGGAAA
AGCCTCCCGGAGCTGATTAAAGCCAGGCCCTGCTCGCTGGAAGGAAGCGCTGAGGTGTTTTCATCCCTTTCCCTCCTATCCCCGAAGACACCGCTCT
TTTCTAAACCCTCCCTTTCTTGTCTTCCTTCTGAAAAACTCGAGCAGCTGCTCTGGGCCCGTGGAAGAGTTTCTCCCTTTGCTGCTCAGCCAAAGGC
CAGAGCCGAGACAGACAGGGAGCTGAGCTGCAGCTGCTTCCGATGTGATAATGATGCCGGTCCCCTGGCCCTCCCACTCAGACCAAGGGCTTTCATA
ACCCTGTGGGGAGCTGCTGTCACTCCTGTGGTTTGGGAAGTGGCTCCTTGGGGCCTCTTGCTGGGAACTTGGGCTGGGCTCCTCCAGGCGGGGCAAA
AAAAAAAAAAAAAAAAAAAAAAAAAATCGGTTGGGTTCTGCCCTGCCCCGGAGGAGTCTAGGGAGGAGGTGGATCTGCTTGGATCTGGAAGGGAGCT
TGAACGTCATCTCCCACAGGGTCTGGGGGAGAGGGTGGGTGAGCTGGCACCTCCCTCCACCTTGTTCTGTGGCTGGCCAAGCCTTCTCTGACCCTGA
GAGGAGTCTCTGGGCCCCATCTCCTAGGGAGGAGGGCAGCAGGCAGACTCCTGTGATTGGCTGGCTGGGAAGCTAGGGTACTGGGGCCCCTGACTGC
TGTGAGTCGGGGAACTGGATTCCTCTTCCTGTCAAGCAGCTCTCACGGATGGGAGGCCTGAGTTGGGAATCCGGGAGGCCCCACAGCTCTTTGTGAT
GAATCTAGTTTCCAGAGCCAGGGAGCACGATGTTTTTGAGGGATTGAGGCTGGGAGGTAGGAGACTTACTCTTTGTGAAGAGATTAAGGGTGGTCTA
CATGGCTGTGTGTGAGGGGAGTTTTTCAGAATAGGCAAAGCCCTCCTTCTCCTGCTCGAGGCCCTGAGCTGAGAGTGGCCTGCGGTCAGAGTTGTGA
GGGACTCCAAGAACTCCAGCAGTCTAAATCCACACAGCAGAGCAGAGGCCCCAGAAAGGAGGGGAAAATCCGACCAGAGCGCCTTGAAGGCAGGGAT
GGGTTGCTGCTGCCAGCTCCTCTGATCTTGGGGTAGGGCTGGGGTTTTTCATGTCATCTGGATACAGGGGAGCGTGCCCACCTAGTGAGGACTCCCA
CACTCCTGGTTGCCATTGGGGTGCCCCTTTAGAGGCTGGATGCTATTTGGTTATTAGGATAGAGCCCAGGGTGCAAGCTTCAAGCTTCCTTGCCTTA
CTTCTGGCTCTAGTCCAGGCTGTTTCTGTGGGGTTCTGTAAGAAGCCTGGGGCTGACACCTAGGTCATGGGACAAAGAAGAGGGACAGCTGTCACTG
GGGGGGTCCTGGAAGATACTGGGTGGGGCTGACATTTCTACCTCAGTGAGGAGTCAAACCCATGAGTTCCTTCCTGAGATAAAACAATGAAGAAATC
CTCCTGTGTGCAACTCGGAAGTGCAGCTCGGGCCAGGGCTAGGAACTTCATATGAGTAGACTGAGGTTGGGGCTCCTAGCCTCCTCCTAAGACCTCT
GAATGGTTATGTAGGCTTGGACAGGTTTCTCAGGGGTCATCTGGATTCATCCTGTTTGGCTTGGATGCCCTTGTCTGGAGACAGGACCCACCCGTGA
TGTCCCACAAAGGGGGGTGTGGGTTGGGTTGGGCAACCTCCTCTTTGAGGAACCTTAGGAGTGGCTTCATGCTCATTTTGTTTAAGAGACCTGGATG
CGATGTTGGGGAAGAAGAGATTTCCGAAGCCTGTGGAATTTAGAGTTGGTCTGTTTCAACTCACGCCCGCCTCAGACTCATGGGAGGATTAAGAGGG
ATTAATTCAGGTCGTTCTAGCACCTAGTAACCATCAATAGATGCTTAAGTGTACGGCCCTAGTTCTTCCCTGCCCCAAACCCGTCATCCCGCGGCAG
CAGCCCCTGAAGCCAGAGGCAGAACTGTGACCCTTCTGTCAAATTCTCGGCCCCCTCGGCCGACTGCTGACTCCATGTTCCTTCCCTAACCCCCAGG
AGTGGGAGGTGCTGGTCCTGGGGAAGCTCAAGTGGGACCTGGCTGCCGTGATTGCGCACGACTTCCTGGCCTTGATTCTGCACCGCCTGTCTCTGCC
CAGTGACCGGCAGGCTTTGGTCAAAAAGCATGCCCAGACCTTTTTGGCCCTCTGTGCTACAGGTAAGAGCCAACCTGGGGGAAATTGTGGGGTTTTT
TGGGAAGGATACGTAGTAACAGCCAGGAGATGGTTTCAGTACTCAGACCTGTGTACAGTGATCTGGGAATACTGAATAAAAGTTACTTGCCTAAGGT
CTTCATAGCAGGGTTTTGGATATTTTGTTGTTCCTGGTGCCAGGTACACCTTGGGTAGATGGAAAGTTTGTTGTTTGCtCATATCTCAGAGGAGGTC
GGGCTGTGGTCTGGTGGGTCAGTGATAGGGTGCATTCCTCAGTCAGATTGCCAACACTGTGAGCACACACCAACCAAACCCCCTCCTCCCTAGGATC
TACCTTGTCCCCTTGGCTCAGTGTCACCCCATTCACCACTGGGGGTTCCCAGGATGCAGCCTGGTGTGTTGTAAGATGGCTCCCTTTCTTTTCCCAG
ATTACACCTTTGCGATGTATCCTCCATCCATGATCGCCACAGGCAGCATTGGGGCAGCCGTGCTAGGCCTAGGCGCCTGCTCTATGTCTGCGGATGA
GCTCACAGAGTTGCTGGCCGGGATCACAGGCACTGAAGTGGTAAGTCTCAGCCCCTCGCCCCCCTTCACAAAATTAAAAAAAAAAAAAAAAAAGCTG
TTCCTCTGAATCTCCAGCAGAGGGCACCATCCACCCGGGCCCCCAACTATGATTGTACGCCCTTGCCTGCTTCTCTGGCCTTTTATCTCTGGCTCCA
GTCTGGAGAGGAGTGGGTGGGGTGAAGGACACTTGGCATGTAGATACCCTTCTCTTGACATCTCTTGACAAGTGCTGTGTCTCGGACAGGGGTGGGG
GACTTGGTGTCAGATGGAGGGTTGCTCTCACACCCTTGCCACATCCTCTTGCCAGTTTCTGAGAACTAAAGACCTGATTCCTGGGCTGGGCTGTGGC
CTAACCTCCCCAGACTTCCCAGTGCACAGGGGGTGGCCTTTCCACCTGCTTGCTGTCAGTGCTGTGAGGGAGAGAGAGAGGCCCAAGGATGAATGAC
CTTGTTTTTTTTTTTTTTTCTAGGACTGCCTGCGAGCCTGCCAGGAACAGATCGAAGCTGCCCTCAGGGAGAGCCTCAGGGAAGCTGCTCAGACAGC
CCCCAGCCCAGTGCCCAAAGCCCCCCGGGGCTCTAGCAGCCAGGGGCCCAGTCAGACCAGCACTCCCACAGATGTCACAGCCATTCACCTGTAGCTT
GAGACAGGCCCTCTCAGGCCACCAAGCAGAGGAGGGGCCCCTGCCACCCCCTCCCTGCCTCTAGAACAATCCATGCTATATCTGAAGCCCGAGGGGG
GCTCTCCTTCCCCCTCACAAAGCCCAAGGGGCCAGGTCCTGCCTATCCCCACAGTGTGCACTAAGGGGTTGCATGGTCATGAGGGGCGTCTTCATGG
CCAGTCAGCTCCTCTTCCTTCCCACTCAACCAGCTTGGCTGTCCTGGGCCATGATGGTCAGAGAAATACAAACAGGTAAAATCCACACACCAGCATT
TCTTTTGAGTCCCTCTTCTGTCCGGGGCTCCAACCTTCTCAGTTGCCAAAACGCCCCAGTACCTTCCAAAGGTGTTGGCCCTTGCAGGCTCCTTCGG
GCATCCCGATAGAAGCTTATGAGGAGCTGCCCTAGATGGCCTCTGTGTAATCCGTACTCCAGCTGCTCTTAGAGGGAACAGCCTAGGCTTTGGCCAG
AGCAAGAACCCATACACTGTTGCTTTGCTTGCTGCTTAGCTTCTGTGATTGTGGGGTCTTAAGGGTGCCGTGGTCATTTTAATTTATTGCTTTGAAT
ACAACTGTAAGAGGGTACAGTGAGGCCTGTACCCCACAAGTGGTGGTAACCCTGGCGGTTGCTCTTTCCCTCCCTTCTTCCCCTCTGCTACTGCTTT
GTGGCCCAGGAGCTGCTACAGCCTGGGATGGGGGTCACGCCTTCCTCTCCTCACCCCTCCACCTCATCTTCATCAGAGCAGGGTTAGGTTGGGATGG
ATCGATGCCGTGGAGGTGACAGAGCTATCTGGAGAGAGGGCAAGCCCTAGGGTCACAGGTCTTTCCTCGGGCCACAAGGTTTGGGCTGGTGGCCCAT
TTCTATCATGCTGCCTTAATAAAGATTTCGGAATAAAGGTGGCTCTTGTGATCCCTGGGGTTGTGGGAGCTGGGGGGCACCAGGCAGCTGTCTTAGG
CAGAGCACTTTTCCTGGGAAGGGTTAGAAAGGTGCCGCCTAGGCAGCATGGCCTGCTTTCCTTGTGGACGAATTACAGCGCTAAGGAGCAGCCAGCA
TTACCCAGAGGGCTCATCGGGAGACAGGGCTGGACCCTTACACAGAACCCTAAGATTCATACGACATCAGGCATGGTGCTTCCTTAGCACACTCAGG
GCAGACAGAGGAAGAGGGCTAGCCTGTGCTACATAGTGCAGAACTTTGGCTCAGCGACAGCACTGGCTACTCCTGAGAGCCTGGACTCAATTCCCAG
CAGTTAACCATTTTAAACTCCAGTCTCAGGGATCTGATGCTGAGGCACAAAGCTCAGAATGTATTAAAAAAACAAAACCGGATGAATGGGGTTAGGG
TGTGGCTGGAAGCACTTCCCCTAGCAGGGAGGCAGGCCCTTCCTCAGTGGTGCTGCAAAGGAGCAGCCCTGCATGGGAGAGGAGAGGAGAGGAAGAG
GGAGGGAGGAAGGGAGGGAGAGCTTGAGTGAGCTCAGGGAGTAATTTGGTTGGGTTGGGCTAGGTTTGTTCTCTTTGCTTTTCCCTAATGTTTACAA
GATGATCTACTGTGTAAGCAAATATGAACTCAACAGACCAAACCTTCTCAGATATACAAACTGGATTGTTATAGACACACGTTTTCAAAAGTGAACG
TGATACAGCAAGGTGACTTCAAGTCAGTCAGCTGTGATGCAATGGTCTAAGGGTTTTTGTTGTTGTTTTTGGTGAGGTAGTGTTTCACAGCAGTGGC
TGGCCTCAAACTTACAGATCCATGGTTGGCTGCTACTAAAATTTCATACAGATTTTCTCAGGCCATTAAAATAATACAAAGATTGTAAGCCTAGCCC
TCAAAAAGTTGAACCATCAGGCAGGTGGGTGGCCAAGTTCAAGGTCAGCCTGGTCTACAGAGTGAGTTCCAGGACAGGCAGGGATACACAGGGAAAC
CCTGTCTTAAAAAACCAAAACCAAAACCAAAACCAAACCAGACAGTATTCTTTGCTCATTAGTTATGCAGACACAGGAACCTGACCTGGCGTCTCAG
CCAGCCTAAAGCTCTGGTTGCTTGATAGCTAGGAAGAAATCCCATTTTTTCCTGATTCTGTTGTGTCACTGTCCCCTAGCAAGGGCCTGCAATATAG
TCTTCCCTGACAGTGAACCACTGCCACTTTTCCAACAGACACCTTTCCAACATGGCAGCAGAATCTGGCATCCCTAGAGTCGGCCCTGACTGTACGT
CATGGTAGGAGTCAGGGGCGCGTGTGCATACATTTCCTGTGAAGAACAAAGGAAGCAAGAGTCTAGAGACACAACTTTGAAGAATAAGGTGGGGTGA
GGTTTCTGTGGGAAGTAAGAACCCGCTCTTCTGAGCTGGGGACAGGGAGGAGCCAGCAGTGACTCCCACCTCTCCCGTGGGTGACAGGGGAGAGAGG
CAGGGACCTCCAGGGACCAAAACACAAGAGCTGCGATAAATAAATGCCTGTTTTCTCCGCACCCCAGCGAGCTTACACAGTATCTGGAGAGAGCAGA
CCTTATACCAACTGCCAGGTGGGTTGTGGGGTCGCTGAACCGAACTGAGGTAACTCCGGTTAGCTTCCAGAAGTGAGCAGGGACCAAAGCCTAAAAT
GGCAGAGAAAGCCAACCAGATGCAGTCCTCCCTGCCCAGGATTAGGCCACGGCAGCCATAGTAGCCCTTCAGTGTCTTGACCTAGGTCTTTAACTAT
ACCAGCTGGGGTCCTGGGGTGGTCCTGCGCCCCCTGGGCCAACACAGGTGACTGTTCTCATTCCATGGTGACACCACCATCCTCCACGTCTCTGGGG
ACAGCGCTCTGAAGCTCACGCCTGATCTCAGGGGACAGCTGCGGGTGGGGCTGCAGCCGAAGCAGCTCCAGGAGGGCCTCCTTCTGCTCTGTGGCCA
GGTCAGCCTTATAGCGCTGCGCTAGTGTCAGCAGGCACTGGTGCCAGAGGACAGGCAGCTGGCGCTTTTCCGTCCGGAAGGCCAGAAAGTGGAAGAC
CAGAGCGTCGAGCACGCGGTAGGGCAATGCGTACTTCTTATCCAGCAGCAGGCGCAGGAAGATGCTGTTGGCACCGCTGTATTCCATTTCTGCGATC
TTCAGCATGGCCGCACTGGAAGGGAAGGTGGAGTCACAGGAATTAGGCCACACCTATGGGAGTCCTCTTCTTACACTGAGCCTTACTTCAGTGTTCC
CAAGGGGGCCACCACAGGCTGCTCACCTGTTGATTACTATGCTCCTGAGAGTTTCTACCATCTCCATCCATCTGCCCCACCCACACCTCTGCCTCTG
GCTCGGAGAGCAAGCAATCCCTGTGTTTAACTACAGATCATGTCCAAATGTCTCACGATCCGCACATTTTAGCACACTTTCTTCCTAGATGCCCATT
TACACACGCAGTCATTCAATTATACTAGCTACCAGGACCCTGGCCCCTGCTCTTGAAGACCTACTATTCTGTTGGAGTAATCATACACCCACTGACA
TAAACGGCTAGACTCGAGGTAATCATAGCTCATTCTCCATTCGCACCCTCACGACCAAGTTCCGGCCTCTCTATCACACGGCTCCTCTCTGACCATC
CTCCTCCACCTCCCCACCACTACCTGGAGTGCAGCACGGGGATGGAGCACTTGGTGATGATGCTGCCCACGATGATGGCTTCACGGAGGGTACAGGT
GCCGGACTCACACAGTGGGATCAGGATTCCTAGGCAGAGTCAGATGCAGTGGCTTTTAGACCGGGGTGAGGGAAATGAGGCGCAGCCCCCAGCAGCC
CCAGGCATCAAGGACCCCCAATGATCTGCCAAGTAAGAGCCCCACCCCCTCCTTTCTCCCCTGCTTCTGCTCTACCTTTGAACCAGGCTCCAGGCTT
GAACAGGGCCTTCTTGAGCGCCATGTAGAGGTGAAAGTTGAGTCGTTTGTATTCAGCAATGTCATCTCGCACTCGGGGAAGCAGGACAAGGTTGTAG
AAGCGCTGAGCCATGCGCTCCTTCAAGTTAGAGGCAAAAATCCTAGCAGGGTAGGAGTTTCCAAGTTACCAGAGAGCCTGACCCTGGCCCTTTAAGA
ATCATCGCGGATGGTGCATTCGAGAGGTTTTATAGTCAGACACGGGGACAGCGTGTTTTATAGTCAGAGCTGTAGCATGGGAGTGAAAGCTCTTCCC
ACTGAAGAGTACCACAGGACTTGGTCATGAAAAACCTGGTGAGATGGCTCAGTGGGTAGGAGCACCCGACTGCTCTTCTGAAGGTCAGGAGTTCAAA
TCCCAGCAACCACATGGTGGCTCACAACCATCTGTAACAAGATCTGACGCCCTCTTCTGGAGTGTCTGAAGACAGCTACAGTGTACTTACATATAAA
AAATAATAAATCTTTAAAAAAAAAAAAAGAAAAACGAAAGAGCAGGGGGCTGGAGAGATGGCTCAGCGGTTAAGAGCACGGCCTGCTGTTCCAGAGG
CCTTGAGTTCAATCCCCAGCAACCACACAGTGGCTCATAGACATCTATAATGAGATCTGATGTCCTCTTCTGGCCCGTAGGCATATATGTAGACAGA
ATACTGTATAGATAATAAATAAATCCTAAAATAATAATAATAATAATAATAAAATAAAAACCAATAGACTATAGTTTCCCCTCTAAAAAACTAAAAG
CCAAAAACCCATAAGACTGAAAGTGACTGAGTTCAAGGCCAGCCTGGTCTACAGAGTGAGTTCCAGGACAGCCAGGGCTACACAGAGAAACCCTGTC
TCAAAAAAAAACAACAATAACAACAACAACAAAAAAAAAAGACTGAAAGTGAGAATATGGAAAATGACATACAAGAAAATGGAATCTAAAGTCAAAC
TTGAATATGCAGTCACACCTGAAAATAGGTTTAAAATCCCCAGAAAGAACAAAGTTAAGGGAGCAGCAGGAGCGAGTCCAAGGGAGGCCCATGGGCA
ACTGAACAGCTCTGGCAGGCAAAGCCCGCACCCCCCACAGCCCACAACCTGGCCCATCAATGATACCTGGTGGCTTGATACATGGCGGCTGCAGTCC
AGGCCTCAGGCTCAGTGACATAGAGGATCTGCTCCCAGTTGGACAGTGCAGGGATGACCTTAAAAGCCTTGGGCAGTTTCCCACTGCGGTACTTACA
TAACACCTGGGGTGAGAGAAGCAAAATCGCCAACTGTGCTGGGGTCCTGGCCCTGTTGCTCACTCATCTCCAGAACCATCTAGAAAGCCTCGTTCTC
CGGGTGACCGGAGTTTAGTAGACTTCCAGGGTCAATAAGAGACAGTGCAAGAACCTGAGCCTATCAGCTCTCCCCCAATCCTGTTCTGATCGCCATG
GCTTATTTGGTGGGGGCCATGGATGAGAGCCCACCCCGAGTCAGGATATCCCAGCACACACACCACTTAGCTCTTACCTCCCGGACTCCTCGGTAAA
CTTCCAGGACCCGGGGATCCAGCTGAGGCATAGGGAAGCCCGATACCTCTGACATGACAGTCTCCACCTCTGTCTGCTTCTCCGTCAACTTCTCCAT
GATGATATCAGCCAGGGTGCGCCTATGGAGACACGGGAAAAAGAGAGGTGGAAAGAATTGGGGTCACTTTCCATGAAACTGTAACGTCCCCTCAACC
TGTTTTTTATCTTTGTTGTTGTTATTTGACACAGGGGTTTTATGTCTAGCTTTGCCTGTCTTAGAACTGGCTCTGTAGACAAGGCTGACCTCAGACT
CAGAGATCCACTTGTTTCTGCCTCCTTTGTGCTGGGATTAATGGTATGCCTGGCTCTGTTTATTAAAAAAGAAAGGCAGTAGTGGTGGTGTAAGCCT
TTAATCCCAACACTTGGGAGGCAGGCAGATCTTTGTGAGTTGAAAGGTCAGCATGGTCTTCATAGGGAGATCTAGGCCAGACAGCAAGCCCCGTCTC
AGAGGGGAAAAAGAAAGTCACAAAACATCCCCAAACAAAACAAGAATGCTTCACAAACTTGCATGTCCTCCTTGCATGGGGGCCACGTCCCTGTCAC
TGTTCTAATTTTAGTGTACGGGAAGCTGGAAGCGAGCAATGTATAATTCCCCTGGACGCTGACAAATCTCGATCCCGCTGGGATGCACAGCCTCAGT
TCCCCTCTATGTCCATTTAGCCGCCTCAAAGTGCTGCAGAGCACGGGCCCTGGATGTCTCTGCATCTGACGCAGAGCCAGAGTGGTGGGGACGTTAG
GCCCTTAGGCCCTGAAGTCAGCTCCGGCTCTTCTGGTCCTTGTATGATCCTGGGCCCGTCACTTGACTCCTCTAAGCCTCAGTTTCCTCATCTGTAA
ACTGGGGAAGTAAAAGGACCCCCCTGGACAGTCAGCTGAAGGGTAAAATCTAAGACTGCAGCAGGCCCGACTCTCAGCCAGAGCCAGCAGGTCCTGA
GGGCTGTTTACTTCAAGCTCACCTCCCACTGCTCACACAACGGGGAGCAACTTCTGAGTGCAGAGTGGAGCTCTGTGCCAGGCAGCGCTGGTGCACA
CCTTTCATCCCAGCGCTCAGAAGGCAGCGGCAGGCAGAGTTTTGTGAGTTCAAGGCCAGCCTATCCTACTCACCCAGCACTTGCCTAGCAAGGATGA
GACCTGGGTTCTGGCTTCCAGCACAAGGGGAAAAAGTTTCTCTGCAGTCTTTTTCTGTGCCGAGCAGCACTGAATCTGACACTTTCCAGACTTGTGT
CCTGTGGTCTGCATGACACTGGTGGCAGGTGCTTTTATTCCCCCGCACTGCCCAGGCCGGGGAATCGAGACTCAGGGCCAACCAACAACTCTCCTAA
GCCCTAAGACTTTCTCAGGGAAAGGGTAAATTTTAGTCTTTCGACTTCTAGTTTGGGTGCTTCGCAGCGTCTTCAATGTGCCTTAAGTGACAAGGCC
TGATTGCTGTGTTCCCAAAGACCCTTAGCCTGGTTTCTGAAGATGCCAGCAGCCACTGCTCAAGAGTGCCCACGGTCCCCCTTTCCACCATGTTGTC
ACTTCCGTATAGCAACTGCAGAAAACATTCTGCTAAGTTTGTCAGATCAAGAGCCACTGGGTATGAGGTGCTGCCCGAGAGCCTTTGGGGGGCACAT
CACACCCCATGACCATTCTCAGAGCTGTCAGACACCTTCAGGGGACAGGGTTCTCCTGTGTTCTCTGAACCCAAGCTGCTCATCACCGTACTATTAA
TGATAGTGGTGTACTACACCCCACTCTGAAGAATAAACTGGTTGAGCCCCTTTGCCCTAAGCCCAGTCCTCTCAATGAGGCCAGATCCATCTGAATG
GAACCAAGAATCTGACCACAGGCAGCCTAAATAACTGCATGTTTAGAAGTAGCATTTATAACACATGGGGGTACGTTTGTGGTTCTACCCAGAGGTA
GTTTTAACCCCTCTGGGAACATTTTGTCAGAGATAGCTGCTATTGGCCCCAACACTGTAACTGAGATGGAAAACCCTGAGTTAAAGACTAAGCTATG
GGCTGGCGAGATGGCTCAGCAGGTAAGAGCACTGACTGCTCTTCCGAAGATGCTGGGTTCAAATCCCAGCAGCCACATGGTGGCTCACACCCACCCG
TAATGAGATTTGGTGCCCTCTTCTGGTGCGTCTGAAGCCAGCTACAGTGTACTTATGTATAGTAAATAAATCTTTGGGCCAGAGCGAGTGGGGTTGG
CCAGAATGAGTAGAAGTCCTAAAATTCAATTCCCAACAACCATATGATGGCTCATAACCATTTGTACAGCTACAGTGTACTCACATACATAAATAAA
TTAATCTTAAAAAAAAAAAAGACTAAGCTATGAGAGTAACGTACCAAGAATAAACACTACTAAACGGATCCCCAGCTATCACAAGGAACCGGTAATC
CAGAGGTTCCAGATCAGATGGGCAAAGGGGAATCCGGGTCACTCCCGTTCAGGGGCCACTCTTGGCAATGGTCAGACCAACAGCTGTGGTCTGGATG
AACTTTCTACCAGGACCCACTGGTCCAACCTTTAAGCCTTACCTCACGGGAGGATTCTTGTTCATGAACATTTCAATGGCACGCTCATCTTCAGGGT
CCACGATCACCTCTGCCTGGTGGTCCACCCCGGCCATTTTGGCTGCCTTCTCCAGGGTAGGCCACTCCTCATCCTCCTCATCTGATCCATCCTGTGG
CAATCCCGGCCCTACAAGATAATCCCAGCCGCAGGGGCTTGTGAGTCAGTTCCCCATTCCACGTACAGCACACCCAGGGAGCAGGAGGGACACCTGC
AGAGGGACTATCCTTTTGTCCCCAGAGACTTGGAATCTTGATAGAAAATACAGCACACGAAGCGAGAGATGATAAGGCCAGTAAAGACTGGATGACA
TGTCCCCTCAGTGAATGGATGACATGTCCCCCCTCAATGACCAAGAAGGATCCATTCTATACTACACACATGTAACCTGGTCTGTCCAGATGACCTC
AAGGAATAGGTACTGTTGCTATACCCAGTTCAAACCGGGGCAGAAGAGTTGATGTGCCCACAGTAGGTAGGCACTGTGGGTCCTGACTTCCCACTAT
GTTGCTTGCACAGTGGAACTGCATCATGTGCTGAAACTAAAACCATGGTGGAGGCAGTGTGCACCTCAGGCACTTGGATGAGTACAGAGGCTGAGGA
GGCTCTGGATGGGCAGTCTGGGAGCAAGAGCATGCTCCACGTCCTGGAAAGTAATGCTGTTAGAGTGTTGGGCACTAAGGAGCCAGAAAGGAAACGG
AAAGCCAACCTGGAAGGCTCTAAGGCTGGGCAGTGGCATTCGGACTCTGATCAACCAACACATTTAAGTTACTGGCTTAGGTAGTCGAGGATGACTT
GGGAGTTCCTTGTTCTCGCGCCTCCACTTTCCAAACACGCACCACAGTGCTGAAGGCTGAGCTTCTGATGTTGGGTTAATCCCGTGTGTTCCATGTA
AAGGCTGCCTGTGTACTATTCACATGTTAATCTTTGTTCCAGCAGAGAGCTGAGTACAGTCGGCATTGGTTTTTTTTTTTAATGAAGCATCACCTGT
CTCAGTGTTGTGGAAACTTCTTCTCCATCACCTTCTGATTGGTTTAATCAAAAGCTGAGTGGCCCATAGCAGGGCTGGAAAGGATAGGCGGGACTTC
TGGGCAGAGATAGGAACTCTGGGAAAGAAATCAGATGTGAGGGGACTCAACAGCCAGACACAGAGGAAGAAACACGTGCTGTTACTGAAGAGCAGTA
ACGAGCCCCGTGGTTGAATGTAGACTAGTATAAAGCAATTATGTTGTATCAGCGAGTTCGGAACAAGGCAGCTAAGGCCAAGCTTTCATAACTAATA
AGAGGTCTCTGTGTCCTCACTTGGGTGATAGGTGGGTTGAGCCATTCCTGCCACATCCTGAGGTCCTGACCATGGAGTCTTGGCTGGGTACTTCCTG
AGTGCTGGGATTAAAGTCATGTGCCAATACACCGGGCTGACTTTTGAAATACCGCACATAGCTGGCAAGGCAGTTGGGAAAGAGTCTAATAAACCAA
AGTAGTTGAATTATTACCATAGCAACAGATCAGTTGCTATGGAAGTGGACTAAGGGTATATTATATAGAGCTCCAGAGAGTACACAGAGCATACCCA
GTGAGAGCCAAGGTTGTTTGTTTTAGGTTTATTTTACTTTTAATGTTTGAGTGCTGACTGCACGTATGTCTGTGCACAAGTGTGCCTGGTGTCTAAT
GACATCAGAAGATGGCATTTGATCCCTTGCAAATGGAGTTACAGACAGCTATAGCCTGCCATATGAATGCCAGAAACCAAACTTGGGTTTTCTGCAA
GAACAAGTGTTCTGAAGAGCTGAGGACCAACTCTTGAGAGTTTTCCTCTGTTCTCTACACACATCATGCCACGCACATGCACACAAAATACATGTTA
AACAAAGGAAGACAAGAGCTATGAAATACGACGTAGGGAAAAGAGAGAAAATCAGGAGACAGTCACTGACATTTGTGTGGTGTTTTGTTGTTGTGAT
CATTTGCTTTTTGTATATGAGTGAACCCTGCATCATGGAAGTGACTCTTGGGAGCTGATGACCTTGTTTTTGAAACAGGATTTGACTGGGACCTGGG
GATAGCTGATTAGGCTAGACTGGTTGCCCAGTAGGCCCAAGAGATCTGTCTTCTACACTGTAGCTCAGAAACTACAAGCTGCTGTGAGTGGAAGTCA
GGGCTCATGCTCTCTCAAAGCATGGACCTCACCAGCTGTGAGCATTATCTTATCCTGTCCCTAGCTTGTGGTCAGACCTGAAACAGAGACAGACCAG
ACAGGACGCCATCAATCTCTAGCTGCTGAATGGACCACAGAGGTCACAGAATTCAAAGCACGATGTTTCCACAGTGATCCAGGGGAGAGACCCTGGT
AGCTTAATCAGGGAGTGTCTCAGGTGAATGGAAAGTGGTCTGGCTCTGAAATACTCTAAAGACAACATCACCAGGATTTACTTTGAAGTGAGAAACA
GGAAGCCTGGACTCTGACTGGAGCAGTGGAGCTAATGTGCTAACAACCTCCAAGTAGCAAACAGAGAGCAAGTTTGGGAAGGAAGTCACAACTTCTG
TTTTAGATGCAATCTTCTTCTTTTATTTTTTTTTTTCCTTCTCCGAGACAGGGCTTCTCTAGGTAGCCTTGGCTGTCCTGGAACTCACTTTGTAGAC
CAGGCTGTCCTTGAACTCAGAAATCCACCTGCCTCTGCCTTGTAAGTGCTGGGATTAAAGGCGTGCGCCACCACTGCCCTGCTTGGACGCAATCTTA
CTAGAGTTAGATACTAGTATTCAACTTGGAGATGTCAGGTAGACCACTGGATATAAAGATGTGAGCTTTCTTGGACGAACTCTGAGGGAGAAAAAAC
TGGAAGTAGCTGTCAAACAAATGGCCTCAAAGTGAAATTCCCTGAC
MOUSE SEQUENCE - mRNA
AGCGCCAGCGCCAGACCCGCCCGCACCCCGCGCTCTCCCTCACGCGCGTCGCTTCTCCTAGGACTCGCTAACCCGCACTCTTGCTCTCACCCGTGAG
CCATCGCAGGATGGAGCTGCTGTGTTGCGAGGGCACCCGGCACGCGCCCCGGGCCGGGCCCGACCCGCGGCTGCTTGGGGACCAGCGTGTCCTGCAG
AGTTTACTCCGCCTGGAGGAGCGCTACGTGCCGCGAGCCTCCTACTTCCAGTGCGTGCAAAAGGAGATCAAGCCGCACATGCGGAAGATGCTGGCAT
ACTGGATGCTGGAGGTGTGTGAGGAGCAGCGCTGCGAGGAGGATGTCTTCCCTCTGGCTATGAACTACCTGGATCGCTACCTGTCCTGCGTCCCCAC
CCGAAAGGCGCAATTGCAGCTTCTAGGTACCGTCTGCCTGTTGCTGGCCTCCAAGCTGCGCGAAACCACGCCCCTGACTATTGAGAAGCTTTGCATC
TATACGGACCAGGCTGTGGCTCCATGGCAGTTGCGGGAGTGGGAGGTGCTGGTCCTGGGGAAGCTCAAGTGGGACCTGGCTGCCGTGATTGCGCACG
ACTTCCTGGCCTTGATTCTGCACCGCCTGTCTCTGCCCAGTGACCGGCAGGCTTTGGTCAAAAAGCATGCCCAGACCTTTTTGGCCCTCTGTGCTAC
AGATTACACCTTTGCGATGTATCCTCCATCCATGATCGCCACAGGCAGCATTGGGGCAGCCGTGCTAGGCCTAGGCGCCTGCTCTATGTCTGCGGAT
GAGCTCACAGAGTTGCTGGCCGGGATCACAGGCACTGAAGTGGACTGCCTGCGAGCCTGCCAGGAACAGATCGAAGCTGCCCTCAGGGAGAGCCTCA
GGGAAGCTGCTCAGACAGCCCCCAGCCCAGTGCCCAAAGCCCCCCGGGGCTCTAGCAGCCAGGGGCCCAGTCAGACCAGCACTCCCACAGATGTCAC
AGCCATTCACCTGTAGCTTGAGACAGGCCCTCTCAGGCCACCAAGCAGAGGAGGGGCCCCTGCCACCCCCTCCCTGCCTCTAGAACAATCCATGCTA
TATCTGAAGCCCGAGGGGGGCTCTCCTTCCCCCTCACAAAGCCCAAGGGGCCAGGTCCTGCCTATCCCCACAGTGTGCACTAAGGGGTTGCATGGTC
ATGAGGGGCGTCTTCATGGCCAGTCAGCTCCTCTTCCTTCCCACTCAACCAGCTTGGCTGTCCTGGGCCATGATGGTCAGAGAAATACAAACAGGTA
AAATCCACACACCAGCATTTCTTTTGAGTCCCTCTTCTGTCCGGGGCTCCAACCTTCTCAGTTGCCAAAACGCCCCAGTACCTTCCAAAGGTGTTGG
CCCTTGCAGGCTCCTTCGGGCATCCCGATAGAAGCTTATGAGGAGCTGCCCTAGATGGCCTCTGTGTAATCCGTACTCCAGCTGCTCTTAGAGGGAA
CAGCCTAGGCTTTGGCCAGAGCAAGAACCCATACACTGTTGCTTTGCTTGCTGCTTAGCTTCTGTGATTGTGGGGTCTTAAGGGTGCCGTGGTCATT
TTAATTTATTGCTTTGAATACAACTGTAAGAGGGTACAGTGAGGCCTGTACCCCACAAGTGGTGGTAACCCTGGCGGTTGCTCTTTCCCTCCCTTCT
TCCCCTCTGCTACTGCTTTGTGGCCCAGGAGCTGCTACAGCCTGGGATGGGGGTCACGCCTTCCTCTCCTCACCCCTCCACCTCATCTTCATCAGAG
CAGGGTTAGGTTGGGATGGATCGATGCCGTGGAGGTGACAGAGCTATCTGGAGAGAGGGCAAGCCCTAGGGTCACAGGTCTTTCCTCGGGCCACAAG
GTTTGGGCTGGTGGCCCATTTCTATCATGCTGCCTTAATAAAGATTTCGGAATAAA
MOUSE SEQUENCE - CODING
ATGGAGCTGCTGTGTTGCGAGGGCACCCGGCACGCGCCCCGGGCCGGGCCCGACCCGCGGCTGCTTGGGGACCAGCGTGTCCTGCAGAGTTTACTCC
GCCTGGAGGAGCGCTACGTGCCGCGAGCCTCCTACTTCCAGTGCGTGCAAAAGGAGATCAAGCCGCACATGCGGAAGATGCTGGCATACTGGATGCT
GGAGGTGTGTGAGGAGCAGCGCTGCGAGGAGGATGTCTTCCCTCTGGCTATGAACTACCTGGATCGCTACCTGTCCTGCGTCCCCACCCGAAAGGCG
CAATTGCAGCTTCTAGGTACCGTCTGCCTGTTGCTGGCCTCCAAGCTGCGCGAAACCACGCCCCTGACTATTGAGAAGCTTTGCATCTATACGGACC
AGGCTGTGGCTCCATGGCAGTTGCGGGAGTGGGAGGTGCTGGTCCTGGGGAAGCTCAAGTGGGACCTGGCTGCCGTGATTGCGCACGACTTCCTGGC
CTTGATTCTGCACCGCCTGTCTCTGCCCAGTGACCGGCAGGCTTTGGTCAAAAAGCATGCCCAGACCTTTTTGGCCCTCTGTGCTACAGATTACACC
TTTGCGATGTATCCTCCATCCATGATCGCCACAGGCAGCATTGGGGCAGCCGTGCTAGGCCTAGGCGCCTGCTCTATGTCTGCGGATGAGCTCACAG
AGTTGCTGGCCGGGATCACAGGCACTGAAGTGGACTGCCTGCGAGCCTGCCAGGAACAGATCGAAGCTGCCCTCAGGGAGAGCCTCAGGGAAGCTGC
TCAGACAGCCCCCAGCCCAGTGCCCAAAGCCCCCCGGGGCTCTAGCAGCCAGGGGCCCAGTCAGACCAGCACTCCCACAGATGTCACAGCCATTCAC
CTGTAG
HUMAN SEQUENCE - GENOMIC
CACACCACTGCACTCCAGCCTGGGCGACAGAGCGAGACTCTGTCTCAGAAAATAAAAAAAATAAAAAATAAGTGGGATCTATTATTATTACTACCTA
ATAGTATTATTACTATTATTGCTCTGGTGTGCTATCAGGGGTGTTGTGCCACACTGGGGACATACTACTCCTGACCCCCCACCTAAACTTTCTTTGG
ATGCCCTCTTCTTCCTGCTTCTCTCTTCTTACTCCCACTTAATCTTTTTTTTTTTTTTTTTGTGTGTGTGTGTGTGTGTGTGTGTGTCGCTCAGGCT
GGAGTGCAGTGACATGATCTCAGCTCACTGCAAGCTCTGCCTCCCGGGTTCACGCCATTCTCCTGCCTCAGCCTCCCGAGTAGCTGGGACTACAGGC
GCCTGCTACCATGCCCGGCTAATTTTTTGTATATTTAGTACAGACGGGGTTTCACCATATTGGCCAGGTTGGTCTCGATCTCTTGACTTCGGATCCA
CCCACCTTGGCCTCCCAAAGTGCTGGGATTACAGGCGTGAGCCACCGCGCCTGGCCTACTCCCACTTAATCTCTAAACTCCTGCAATCCCATTTCTT
TCACCATGGCTGTTTCATGGAATTCAGGTGATCAGAACCACCAATCTCCACCAGTCCCAGGACAGCCCACCCTTCCTGTCACACAAACCACCCTGCC
TACTTCTGATGGGTGTTGCAAATGCCGAGGTAAAAGTCTTCTGTCTTCATGACATCTTAGGATTCCTGCATCATGGAGGATCATCATATCATGCACT
TTAGACTGGAAGCTTAAAAGGGTGGCTTCTCGGCCCAGCGCAGTGGCTCACGCCTGTAATCCCAGCACTTTGGGAGGCCGAGGCGGGCGGATCACGA
GGTCAGGAGATCAAGACCATCCTGGCTAACACGGTGAAACCCCAACTCTACTAAAAATACAAAAAATTAGCTGGGCGTGGTGGGGGGCGCCTGTAGT
CCCAGCTACTCGGGAGGCTGTGGCAGGAGAATGGCGTGAACCTGGGAGGCGGAGCTTGCCGTGAGCTGAGATCGCGCCACTGCACTCCAGCCTGGGT
GACAGAGAGAGACTCCATCTCAAAAAAAAAAAAAGAAAAAAAAAAGGGAGTCTTCTCATCTCTGACCCATGTCCAGCATGTCCCAGGGCTTCCGAAG
GCCTGCCTGATGTATGGAAGGCACATGATAAGGCACCTGATTGTTAATGACCACAGCTATCTTTATTGACCACCTACTATGAGCCTGGGACAGCTAA
AGTACTTTTCCCTTATTAATCCCCTCATTCACCATATGAAATAGGAGTTGTTACCATCCTCCTTTTGCAAATGAGAAGGCTGGGACGGAAAAGTTAA
GTAAACTGCCCAGGATCACACAATCACACAGCTGGCAAATAGCAGAGCTGGGCATCAACCTAAATCCAGAGCTCACTTACTTAATGACTAAGCCAAA
CTAATGCCAGTGCTATCTCCTGCCTAGAATGAGGAATGCTTGCCAGCCAAGAACCGAAGACAGCTCTCTTTTTGCAGGTATATTGCTGTAGCAGGTT
ACCCTTCCACACCTGAGGCCCTGTGTGCACCTCAGTCTTACCTGTGGAACAGGAATCTCAAGCAGAATGACAGAACAGGAAAGCCTCATTTATTCAG
AACCCAGACAGCCAGAAAAAGGAAGAAAAAGCAAATGCTTAAATATATAGGTTGTATTCTTTTTTTTTTTTTTTTAATCTTGCTCTGTTGTCCAGGC
TGGAGTGCAGTGGCGTGATCTTGGCTCACTGCAAGCTTCCCGGGTTCACGCCATTCTCCTACCTCAGCCTCCCGAGTAGCTGGGACTACAGGCACCC
GCCACCACACCTGGCTATTTTTTTTTTTTTTTGATATTTTTAGTAAAGACAGGGTTTCATCGTGTTAGCCAGGATGGTCTCAACCTCCTGACCTTGT
GATCCGCCCGCCTCAGCCTCCCAAAGTGCTGGGATTACAGGCTTGAGCCACCACACCCGGCCCTGTAGGTTGTATTCTTATTTTATGAGGAGAGACT
TGACAGTTTCAGGCTAGTACCTGAGGTTTCTTTTCCCAAGCAGCTTATAAGCTAGAAATTGCAAACTGCTTTTTGTCCCTCAGACCTGGTATATAGG
CATATTATGTGTGGCTTGCACGGTTTTGTTACTGTTTTTCAACTCAAGTAATATAGATATTTTAGGAAATTTCTTTTTTTTTTGTTTTGAGACGGAG
TCTCGCTCTGTCGCCGCCTCCCAAAGTGCTGGGATTACAGGTGTGAGCCACTGCGCCTGGCGGAAATTTCTTTTCTTTTGAGACACAGTTTCATTCT
GGGATTACAGGCGTGCGTCACCATGCCTGGCTAATTTTTGTATTTTCAGTAGAGATGGGGTTCCACTATGTTGGCCAGGCTGGTCTTGAACGCCTGG
CCTCGCTGGTCTTGAACGACTGGCCTCAAGTGATCCACTCACCTCAGCCTCCCAAAGTGCTGCGATTACAGGCATGAGCCACCACACCCAGCCTTTT
TCTTTTCTTTTGTAGTAATGGGGTCTTGCTGTGCTGCCTAGGCTGGTCTTGAACCCCTGGCCTCAGTGATCCTCCCAACTTAGCCTCTCAAAGTGCA
GGGATTGCAGGCGTGAGCCATCATGCCCGATCTAAGAAATATTATCTTGGGGAAACAGGGAATCTATGGCCACACTCATTACTATGGTGTAGCAAAA
GTCTGAAGCTAAGCAGTACTTTTTGAGCTTTGGATGGGACATGTGCTATCTACTGTGTCTGGCCCCAACAGCTCCCTTAACCCCATGTGAGTTGCCA
TTTATCATGTGGTGTATGCTGGTGTTTTTCTTTTTTCTTTTTTTCTTTTTTTTTTTTTTGAGATGGAGTCTCGTTCTGTAGTCCAGGCTGGAGTGCA
GTGGCACGATCTCAGCTCACTGCAACCTCCGCTTCCCGGGTCCCGGTTCAAGCAATTCTCTTGCCTTAGCCTACTGAGTAGCTGGGATTACAGGCAC
GCGCCACCATGCCCAGCTAATTTTTTTGTATTTTTTACTAGAGACGGGGTTTCACCATGTTGGCCAGGCTGGTCTTGAACTCCTGACCTAGTGATCT
GCCTGCCTCGGCCTCCCAAAGTGCTGGGATTACAGGCGTGAGCCACCGCGCCCAGCCTGGTGTTTTTCTTATATCCAGTTTGTTTTATTCATTAACT
CAAAAAAGATTTATTGAGCCAGACGTGGTAGTGCACGCCTATAGTCCCAGCTACTTGGGAAGCTGAGGTGGGAAGACCACTTGAGCCTGGGAGATAG
AGGCTGCAGTGAGTCGTTATCATGCCACTGCTTCCAGCCTGGGTGACAGAGTGAGACCCTGTCTCAAAAAAAAAAACAAAAAAAACCAAAAAACTTA
CTGAACATCTACTATGAACTGGATACCATCCTGTTTTGGTGGTGTGGTGTGGGAGTAGACAAGCTGTAAACAGAATATGCAAGCAAAGTATATGCTA
TACTAGTGATCAGTGGTAAGCAGAAAAATAAAGCAGGGAAAGAGCATAAGAAGTGTCAGGGCTGGGGAGCTGGCATTAAAAATTTAGGTAGGATGGC
CAGGAAAGGCTGTAAGAGGAATGCAACTTTTGGACTTCCTGAAGGAAGTGAGGGAGTGGGCCATGTGGATATCCGGAGGCAGAACATTCCAGGCAGA
TGGAACAGCACGTGCAAAGAGAACATGTCTGCCCGGTGTGTTCCATGAACCGTGTGGCCAGAGCAGAGTGAGGGAGAGTAGTGGGAAATGGGGTGGG
AGTATAGATGCTGCAGGGTCTTTGGCAGTCACTCCAAATGAAATGGGGAGCCTCTGAGAGTGATGGGTTGAGACTAGACTGGAGGGCCAAGGGTGGG
TCAGGGAGACCCGGCAGGAGGCTACCACTGTAATCCAGGTAAGAGATGATGCAACTCGGACCGGGGGGTAGAAGTGGAAATCGAGAAAAGAAGGGGA
TTGGAGATGTATTTTTGACGTAGAATCAACCAGAAGTGGGTCGCAGGTTGGATGTGGGGGACCAGTAAGGTCAAGGAAGAACTGAGTTTGGACAGAG
GAAGTAACAGAGGAGGAAAAAAAGAGTAGATTTTGGAAATATTTTGAAATTATTAATAGCTCCTCTGTGATCTGCTGATCAGAGTGTGGGGATTGTG
TGGGATTTGAGAAAGAGGAGTCAGGAATGACACCAAGTGTTTGGCCTGAGCCATTGGAAGGATGGAGTTGCCATTTTCTGAGATAAGCCTGTAGGAA
GAGCGGGTTTTTTGGGGAAAGATTAGGATATCAGTTTTGGAGAAGTTGAGTTTAACTGGCCTATCGGACATCCTTGTGGTGTTGCCAAGAAGGCAGC
CTCCAGTATAAAATGGAAACTAAAAACAGGTCAGTTCACACCAACTCTGATTTGGTAGTGCTGCCTAAAGTGCTGTGTTGGGATTTTAAATGCCCAT
CCAGGCTGTTTCTTTTCTTTTCTTTTTTTTTTTTTGAGACGGAGTCTTGCTCTGTTGCCCAGGCTGGAGTGCAGTGGCGTGATCTCAGCTCACTGCA
ACCTCTACCTGGTGGGTTCAAGCGATTCTCCTTCCTCAGCCTCCTGAGTAGCTGGGATTACAGGCATGCGCCACCATGCCCAGCTAATTTTTTTTGT
ATTTTTAGTAGAGATGGGGTTTCACCATGTTGGTTAGGCTGGTCTCGATCTCCTGACCTCGTGATCTGCCCGCCTCGGCCTCCCAAAGTGCTGGGAT
TACAGGTGTGAGCCACTGCACCCAGCCAATTTTTGTATTTTTAGTAAAGATGGGGTTTTGCCATGTTGGCCAGGCTGGTCTTGAACTCCTGACTTCA
GGTGATCCGCCCACCTCGGCCTCCCAAAGTGCTGGGATTACAGGTGTGAGCCACCGCGCCCAGCCGAAGAGTGCTCAATTTTTACTGATAGGAATGG
ACAAGCAAAGAGTTTTAAAGATTAATGTGAAATATTGTACAAATATTACAGATGCTCATAATAGTGACCTGGAATACTGTAAGCACCGAGATAGCTC
CTTGATTCTCAAAGAAAAAAGCTAAATTATATGTAGTTTGGTTTACTGCTTTTTTTTTTTTTTTTTTTTTTTTTTTTTTGAGACAGGTCTCTGTTGC
CCAGGGTGGAGTGCAGTAGTGCGATCTGGGCTCACTGCAATCTCCATCTCCCAGGCTCAAACAATTCTCCTGCCTCAGCCTCCTGAGTAGCTGGGAC
TACAGGCGTGCGCCACTGCGTTCGGCTAATTTTTATATTTTTTTTTTGGTAGAGATGGGGTTTTACTGTGTTGGCCAGGCGGTCTCAAACTCCTGGC
CTCAAGTGATCTGCCTGCCCCTGCCTCCCAACGTGCTAGGATTACAGGTGTGAGCCACCGTGCCCGGCCAACTTTGTGCTTTTAAGTCCCGCAATCA
CAACTAACTTTTTAAAAAAGGGTTCACCACGTGCCAGCCACTCTTCTATGTATTTTAAACAAATCAACCCATTTCCTCCTCACAACCACTCTGTGGG
GGGGTACTACTGTTATCACCATTTTTAGAAAAGGAAACTGAGGCACAGAGAGGTGGTTTAACTTAGCCAAATTCACACAGTGAGGGAGTGGAGTGGC
AGAGGGGTGTGGCTCCAGGCCCTGGAGGGTCCTCTCCATACGCTAGACCATGTGTTTACCGTTAGAAGCCAGGTCTTCAGGATTTGCTAGAGATGCA
ATTCTAGGAGTAGGGCTCTTGCTGCTCAAACTTTTGCTTTTCTTAGAGGGGTTATGGATGCATGTTCATAACAGAAAGGGTACTCCTTGAGAAAGGG
AATAATAATAATCATTTCAGAAACTACTATCTCTGAATGCTTGCTTTGTGCCAGGCACAGGTAAGACATTTTCTGCTTGTTTAATTTTCAGAACATC
ATTATAGGGCTATTATATTATCCCCACTGGATAAAAGAGGAAGCAGAGAGGTTCCAGTAATTCTCTCAAAGTCATAAGCTGTGGAGCCAGGTTTGAA
CTGAAAGCAGTCTCTGACTCCAGAACCCTGTTTAGCACCCCTGTTCTCAGCCCCATGGCTCGCTTGGCTCTCCCCAGCATCTCAATGGGTCTGAAGG
TAACTAAGCCATGGCATGTGGACTGTGGGGTGATGGGCCTCACCCATCACCTTGTTCAGCCTCTCACTTCTCAGATGCGGACTTTTTTTTTTGGAGA
CAGAGTTTCGCTCTTGTTGCCCTGGCTAGAGTGCAATGGCACGATCTCGGCTCACTGCAGCCTCTGGCTCCAGGGTTCAAGTGATTCTCCTGCTCAG
CCTCCGGAGTAGCTGGGATTACAGGCATCCACCACCACACCTGGCTAATTTTTTGTATTTTTAGTAGAGACAAGGTTTTACCATGTTGGCCAGGCTG
GTCTCGAACTCCTGACTTCAGGTGATCCACCCGTCTTGGCATCCCAAAGTGCTGGGATTACAGGCGTGAGCCACCGTGCCTGGCCCAGATGGGGGTA
TTTTGATGATGAAGAGGAAGAGAAAGAAAATGTATCTTTCCTCCTTGGGGTTTCTTATTTGGCCTGTGACATTCCATTCCCACCCCTCCTCCAATTT
GCCATTTTATTGACTTTTTCTAACTGGATGTACCTGGGTAGAAACTCCTCATACTATTGGCCCTGGTCATTGCTTTGTCTTTAGTTTTCCTTTTAGA
AAAACAAAAACAAAAACAAGAAAAACAAGAGGAGCCTCTATTTCTTTGAGGTGGAGGTAACTGGTGAACTTGTGCTGGTCCTGCATTGAGCTCACCT
GCCTCCCCAGTGGCCAGTCCTTGGCCCTGAAAGTCAGGGATGATCTAGCTCTAGGCATGGCTATTCCATCCAGGGGTGAGGCAGAAGTATCTCTCCT
AAAGTCCTGCTCACCAGGAGCTCCCGTCCCCATACTACAGGTTCACATCCAGCTTTCAGGACTAGTCAGTCTATGTGGCCCTCCCTCAATTAATAAA
TCAGCAACTAATTTGCCAGGTGCGGTGGTTTGTGCCTGTAATCCCAGCACTTTAGGAAGCTGAGGCAGGCAGATCACTTGAGGTCAGGAGTTCGAGA
CCAGCCTGGCCAACATGGTGAAATCCCGTATCTACTGAAAATACAAAAATTAGCCGGGCATGGTGGTATGCACCCGTAATCCCAGCTACTCAGGAAG
CTGAGGCAGGAGAATCACTTGAAACCAGGAGGCAGAGGTTGCAGTAAGCTGCACTCCAGCCTGGTGACAAGAGCAAAACTTTGTGTCAAAAAAACAA
AGAAAACCAAAAAACAAAGAAAAACACAAAAAACCCTTCTATTTGTTAAAAAAAAAAAAATCCACCGTGAACCAAAAATTAGTAAAAACAATGAACT
AAAATTTTGTTTTTGCAAAATGTATGATAACAAAATGTTAAGGAAGGTCATGTGCCGTTATGGTTCACTGCAGCCTTGAACTCCTGGGCTCAAGCGA
TCCTCCTGCTTCGGTCTCCCTAGTAGCTGGGACTACAGGCTTGTGCCACCGCACCCAGCTTATTTTTTTTTTTTATTTTTTGTAGAGATAGGAGTCT
TGCTTTGTTGTCCAGGCTGGTCTTCAACTCCTAGCTTCCAGTGATCCTCCTGCCTCAGCCTCCCAAAGTGCTGGGCTGATGGGACATTTTTATACAT
AGTGCCATGTTACTATAAATGAGAAGTTTTAAAAATACTGATTTTAAAAATTAATTTATGTCAAGAATTTTTATAACCAAAGTTAAAAAACCAAACA
AAAAATATGAAAAGGGTTAATATCTTTGAGAGGTGATGAGAACTTATAAGTCAATAAGAGAAAACAAACATCCCTATAAATGAATAAGCTAAGGACA
TGAATGGGTAATGTACATAAGAAATGTAAATGTCTAGTAATATGCCAAAATAGATTTATTATTACTAATAAGCCACTTTCACTCTCTAGTTGGCAGA
GTTGTTTTGAAAAATAGATATGTAATGATGGTGGAAAAGATTGGTTTAACTATTCAGCAGGAAAATTTGGCAATTAGAAGTGTATCAAAAGCCTTAG
AATGTTTCATAACCTTAGATTGGGAAATTCCACTTCTAGAAATTAATTCACTTCTAGAAATAATCATGAGTGTGCACAAAGATATTACCACAAAAAT
ATTTTACAGTATTATGTCTAATAGAGAAGAACTAGAAATAATTTAAATTTCCACCAATACAGGTTTGCCAAAATACATTTTGTACATTCACCTAATG
GTATATTATGTCCCTATTACAAATTATGTCCTAGAATATTTAATAGCATGGAAAAGTGTTAACAGTATTTTTTTAATGAAAAAAGCTTACAAAACAG
TTTGTGATGATTCCATTTAAAATGTGTGTTTATTCATAGAACAAAGATTAGAAAAATAAACATTGATATATTAAAGGGTTATTTCATGGCAAATTGC
AAATGATTATTTCCTTTTTTTGTGGCTTATTTGTATTTTTGAAGTTTTCTACAATGTAAAAGAATATTTTATGATATGAAAACTACAATACAATTTA
TAATATAAGAAAGAATAATTCGGCCGGGAACGGTGGCTCACGCCTGTAATCCCAGCACTTTTGGAGGCCGAGACCGGCGGATCACGAGGTCAGGGGT
TCAAGACTAGCCTGGCCAACATAGTGAAACCCCATCTCTACGAAAAATACAAAAATTAGTCAGGCATGGTGGTGCGTGCCTGTAGTCCCAGCTACTC
GGGAATTGCTTGAACCCGGGAGGTGGAGGTTGCAGTGAGCCCAGATCGCACCACTGCACTCCAGCTTGAGCAACAGAGTGAGACTTCGTCTCAAAAA
AAAAAAAAAAAAAAAAAAGAATAATTAACAGAAAATGGTTAGACACTTCCTTAGTGTCTCCTAAGTCAGGAGGACCCCAGTAGGGCAGGGATCCTCA
TGGCCTCCTCCCATTTGGAGCATTATTGGAGGTCTTTTTCGGCCTCTTCGTCAAGTGGAATCTAGCTTCCGGTAAAACTACAAAGTAACCAAAAGTT
TGGGAGGTGGAAGAAATGCAACCGGTAGATCTCACAGAGTCTGTGCAAGAAACTGATTCAATGAGAATCTAGTTTCTCCGTCCACAGTTTCTCCAAA
CAGAAACTAAGGCCGACTTTAGGGGCTTGTCCAAACCTAGGCAAGCAACTTAACAAGGTGAGGCCATGACTCCATGGCCTTTCCGTTCTGTTATATG
CTGACTTAGACTAAAGCTCTCATACTTTAAAGTGCACAGAAATCTAGTTAAAATGCAGATTCTGATTCAGGTTAGGGGTGGGCCTGAGAGTCTGCAT
TTCTAACCAGCTCCCAGGCGATGACCACGCACGGGACAGGTCTGGGATCACAGTTTAACTAGCAATGGTGTAGAACACAGAATCTGCAGCAAGAAGG
CCAGCTTCCCAATCCTAGCTCTGCCACGGACCAACTGAATGACAGTTGCCTCGGTTTCCGAGTTTTCGTGAAGATGTAGTGAGTCATTACATCGTGA
GGCTTTCGAGCAGCGTTCACTAAGAACTAGCTCTGACATTATTTATCGCATTCCTTAGAGCAAGCAGCCGGTGAAGTAGGGTTTGACGAATGAATAA
GTGAATGAATGACCTTTGGAGAAAAATTGTTTCCTGGGTGACTAGAGTCCGAGAAGCAAAATGGGAGGGCCCGTGGGTGGGTAGGAGGCCCACCTCC
TAGAAAGTTCTCTGCACCCGGTGGTCCAGAGGGCCTGGAGTGCCCGGAAGCCGGCCGGCTTGCGCTCAGCGGCCCAATGGGGCCGCGGGAGGGAGGG
GAGAGCGCTCAGCCAACCCTTTCCGTCCGGGGCGCCGCAGCCCCGCCCCTCGGAGCGTTGCGACGTCCGAGCATTCCACGGTTGCTACATCGTCGCG
AGGGGCGGGGCGCCTGTCAGGGAAGCGGCGCGCGCGCGCGGGCGGCGGGCGGGCTGGGGATCCGCCGCGCAGTGCCAGCGCCAGCGCCAGACCCGCG
CCCCGCGCTCTCCGGCCCGTCGCCTGCCTTGGGACTCGCGAGCCCGCACTCCCGCCCTGCCTGTTCGCTGCCCGAGTATGGAGCTGCTGTGTTGCGA
AGGCACCCGGCACGCGCCCCGGGCCGGGCCGGACCCGCGGCTGCTGGGGGACCAGCGTGTCCTGCAGAGCCTGCTCCGCCTGGAGGAGCGCTACGTA
CCCCGCGCCTCCTACTTCCAGTGCGTGCAGCGGGAGATCAAGCCGCACATGCGGAAGATGCTGGCTTACTGGATGCTGGAGGTACCGCCCGGACGCG
TCCCCCTCCCCCACCGCTCCCGGGTCTGGACACACCGGGGCCGCCCTGTCGGGACATCCCGGTCCCCACAGCAATCTGCAGGATGCTCCGAGGCTAA
GACTCCCGGGGCCTGGCCTTTCACTAGGGCACCCACGCCAGCTGCCTCCCTTGCTTTCCCGAGCCCTAATCGGCTCCTCCCGACAGTGACTGCCAGT
CACTTGGCACCCTAACTGTGCCTCTCTTCGGGCCGAGCAAACGGGACCAAGGACACTCTCTCCCCTTCGGCTTCTCACAGCGTCTCCCGCTTCCCTC
CGCCTCCCGGCCTTCTCCGGAGAGCGCGCCTGGAAAACCCTGGGCTCGGCCGCCCCCGCCCGGGAGCCGGTTCCTGTGTCTTTCGCGGGGTTCTGGC
GGGGAAGGCGATGGGGGTGGCGCGCGCCCTGTTCCGGCCGACAGGGAAATGAAAAGTGCAGGAGGCAGCGGCAGGAGCCTCCTCCCTTCCCCTCGGG
TGTGTGCAGTGGTGGCGGTGATGGGGGTGAGGTCCCAGCTCTCTGGCTACCATGGGTGACCCTTGCGTCCCACTTCCCCTCGCTGTGGGGGAGGGGA
GTCTCCGTTTGGAATCCTCCGTGAGCAAGGGCTCCTTGGCTTTACCACTCCCCCGTCAAGGGGAGAGGGGAGGAGGCCGCGCAGAGGAAGTGGGGGG
CGTCACCTTGGGGAGGGCGCATCCTCCTCCTTTATTGGTCCTTGTCTCTCTAAGTAGCTTACCCTCTCTGCCGTTTTTGCTCCCTATCCCACCTCAC
TTCAGCGCTCCCACCCCCCCGCTGCTGTGTTCCCCACGCTCCAGACCCAGCAGTGACTGTGCGCCCTCCCCCAGGTATGTGAGGAGCAGCGCTGTGA
GGAGGAAGTCTTCCCCCTGGCCATGAACTACCTGGATCGCTACCTGTCTTGCGTCCCCACCCGAAAGGCGCAGTTGCAGCTCCTGGGTGCGGTCTGC
ATGCTGCTGGCCTCCAAGCTGCGCGAGACCACGCCCCTGACCATCGAAAAACTGTGCATCTACACCGACCACGCTGTCTCTCCCCGCCAGTTGCGGG
TGCGTGTGTAACTCCCCCCACCCCCGACACGTATTGTCTCCCCACTTTCCAGGAAAAGGAAACCTTGAGATATCAGAGGCTTTCTGCCCCCTGGAGA
GGAAGCAAGGGGATCAGGACCTTTGGGAAAGGAATTGGGGTGGAACAAACGATGGGGCATTGTGGTGTGATGGTTAGTATCACTCCCGCCCAGGCTT
GAGCTGCAGGCAGGCATTAAACCCCCTCCTCCTGACCTCCAGGGGATGCCACTCCTTCCTGGTCTTTCCCCCAGATAGCAACAAGTCAAATTGCATG
GGGAGTGGAATGTGCTTCATGTGGGGGAGGGGGTTTTGCCTTGGTTGAGTCTTTATCCTCATGTGGACTTTGTGATAGAAAAGCCTCCCAGAGCCAA
TTAAAGCCAGGCCCTGATTGCTTTAAGGAAGGGCTGATGTATTTCATCCCACCTTCTTTGCTTCCTCTTATATCCCGGAAGAAACAGCTTCTTCCTA
ATCCTTCCTCGTCCTCATTCTGAGGAACTGGAGCAGCTGCTTTGGGCCTGGTGGAAACAGCTCCCTCTTCCCCCCTTAGCCCAAGGCCCAAGCTGAG
GGACAGACAGGGAGGTGAGCTGCATCTGCTTCCGATGTGATAATGGTGCCCCCTCCCCTGGCCCGCCCTCTCTGACCAAGGTCTTTCATAACCCTGT
GGGGAGCTGCTGTCACTCCTGTGGTTTGGGAAGTGGCTCCCTGGGCCTCTTGCTGGAAACTTGGGCTGGGCTCAGGCCGGGCAGGAAAGTCACCGGT
TCTGTCCCGCCTCAGAAGGAGCCTGGGGAGGAGGCGGGGGAGCTGCTGGATCTGGAAGAGGTTATTTAGGACATGCAGATTGTCTCCTAGGGAGGCT
GGGGGAGAGGGTGGGTGAGCTGGCACCTTCCTCCACCTTGCTCTGTGGCGGGCCAAGTCTTCTGCTGACCCTGAGAGGAGTCTCTGGGCCCCATCTC
CCAGGGAGGAGGGCAGCAAGCAGGCTGCTGTGATTGGCTGGCAGGGAAGCCAGGGTACTGGGGCCCCCGACTGCTGTGAGTCGAGGAACAGGATTCC
TCTTCCTGCCAAGTAGCTCAGAGATGGGAGTAGGAGGCCAGAGTTGGGAATCCAGGAGGCGCCACAGCTCTTTGTGATGAATCTGGTAGTTTTTGGC
AAGTCTGAAGGTGGAGCTAGTTTCCAGGGCCAGAGAGCAAGATGTTTTTGGAGGGGTTGGGGCTGGAAGGTAGAAGGGGAACTTCCTTTTTGTGAAA
AGATGGAGGTGGTTTGTGTGCCCACGTATGAGGGTTTTTCAGTACAGGCAAAAAGTACTCTTCCCTCTGCCTGAGCTGGGGGTGGAGTGCCCAAAAG
ACTTCCTAGAAGGTCAAGGTTGGAAGGGACCTCTGAGAACTCCAGTTGGTCCAAATCCGTGTGCAGCAGAGGAGGCTGAGGCCCAAGGAAGGAGGGC
AAGGTCCTGCCTCAGCATCGCACTGAGCAGATGAGTGTAGAACCTGGGTCTTCTAGCTAGACCAGGTTGCCTTAAAAGTCAGGAATGTGATGGCCGC
TGCCACCTACTGAAGCTAAGCACTCCCAGGGGTGTGTTCTCCACCAGTTAACACTGGGATTCTCTGGTTGCCTGGATATGGGGAAAGGTGGCCACTT
TCCCTCAAACACAACCCCTTGCCTCCCCATAGGGAGAGTCCCACTCCCAGTTGCCTTCCAGATGCTTCCTTAGAAGCTGAGTCCCTTCTGTTTACTG
CTGAGTTAGGAGTTGGCTCCTGGGACATGCACTAGGGGTAGCGTTGTAATTTATCTGTCTCACTTCTGGCTCCAGGCCAGGCTATTTTCTCTGGGGC
TCTGTGAGGGTAGGGGTTGATTTGAGAGGCTGACACCTAAGCTGGGGCCAAGAGAGAGACAGCTGTGGCTGGGGCCTGGAAGAGGTTGGGTGGGGTT
GCCATTTCTGCCTCAATAAGGAGTCAAACCCACAAGTTCCTTCCTGAGATAAAACAATGAAGAAATCCTCATGTGTGCAACTCAGAAATGGGGCCAG
GTCTGGGAACCCATGACGAGTGGACTGGGGTGGAGCTCCCAGCCTTCTCCCGAGACCTAGTACTGGCAGGTAGGCTTGGGTAGGTGAGGATAGGGCT
TGATCCCTCTGGAATCATTTGGAGCCATCCTGTCTGGCTTGGCCTCTACCTATCCTCCTGAAAGTCAAGTGGCATGGGGCACTACGGGTTCCAGCTA
AAGGGGGTGGGGTGGGGTGCTATACCTCAGGACCCATCCCTGATATCCTACCAAGGGGATGTGGCTTGGGTTGGGCAATCTCCCCTTTGAGGAACCT
GAGAAAAGGCTCTGTGGCTGTCATTGGAGGAGTCATACTCCCTTCTGTTGATTCAAGAAGTGTGGACTTGGCTGGGATGCAGAGTTGCAGGGGAAGC
TAGTGGTGATCTCCCCTTTCACAAATCCTTGGGGTTGAGAGAGTCTTTCTGCTTCATCCCAGAAGAGAGCCCAGTTCATGGTGATGCTGTGGTATCT
GCTGCTTCCGTCTTTCAGCCCTGGCTGGAGAAATCCTCAGAGCCCTGAATGAAGTCAGGAGAAGGCCTGGATTATTGGCCCCTTAAACATAACCAGA
CAGGATTAAAAGGGATAATCCATGTAAAGCATGTTGTCCTGGCACCTAGTAAATGATCAGTAAGTGCTCAAAGCACATGCCTCCTCCTCTTCCCTGC
CTTGAACTCCATGGTGCCCGGCCTTAAAATCAGAAACAGAACTGGGGTCTTGGGCTTTAAAAGTTTGATGGGCTTCCCTGCCTGAGACTTTGAGACT
TCTGCTTTGCTCCCTCCTCTTCTCTTCTCCAGCCACTGACCCCACCCTTTCCCCGCTTTTTCAGGACTGGGAGGTGCTGGTCCTAGGGAAGCTCAAG
TGGGACCTGGCTGCTGTGATTGCACATGATTTCCTGGCCTTCATTCTGCACCGGCTCTCTCTGCCCCGTGACCGACAGGCCTTGGTCAAAAAGCATG
CCCAGACCTTTTTGGCCCTCTGTGCTACAGGTAAGAGCCCTATGCACATTTTTGCCAAATTGGAAAAATCAGAAGACTTATAAGGGTGAGAGGTAAC
TGAAGATTCTGGTTTATACTGTCAAAATTCCTTTGTGAAAATTATACCCCCTCTGAGCCCCCAGTCTCAATGCAGAAAAGCAGGTTATAATCAGCTA
TATGGGATCTCAGACCCCTCCAGTTTGTAGTGGGGACACTGAGGGTATAGAGAGAAGTGACTTGCCCAAGGTCTCACAGTGAACAGGTTGGGAACAG
AACCCCAGTCTCTTGGCCCTAGTTGTGTTCCCATACTAGGGAGTGTCTTGTCTATTCCCGGGACCTATGGAAACTGGCAGTTGGTTCTGATCTCTAG
GAAAGATACTCTTTCCTGTCTTCCTCCCTTGCTGATATCTTGCCCCACCCACTGCTGGAGTTTTCCAGCATGTCCTCTGCTCTACTCATGCTGCCTG
GCACTTTCCAAGGAGTCGGAAGTCCATGCTGGCCGTTATCCTTCAGGTTTCCTTCTCTCATGGTTCCCTTTCCTCCTCTCCAAGATTATACCTTTGC
CATGTACCCGCCATCCATGATCGCCACGGGCAGCATTGGGGCTGCAGTGCAAGGCCTGGGTGCCTGCTCCATGTCCGGGGATGAGCTCACAGAGCTG
CTGGCAGGGATCACTGGCACTGAAGTGGTGAGTGCTGGGTAGCTGGGCAGCAGCCTCTCCATTCATAAAGTAGTGCTATGCCCTGAGCCTCCAGTAG
AGGGAAACCTCCAACCCCAACCTGGTCCCAAGTCCTGGTTTCACAACCTTGGGGCTTTGTGGCTTTTTATCTCCTGCCTTGGTCTGGGGAAGAGCAA
CTATCTTGGGTGGGGTGAAGGGCACTGGCCCTAGGGGTTCTTTTCTTGCCAAGTGGTGTGCTGGAGTGGGGGTGGGGGGTTTGGTGTCAGATGCAGG
GCTGCTCTCACACTCCCTTGCCACATCCTCTTGCTAGTTTCTGAGAACTAAAGAGCGATTCCTGGGGCCGGGCTGTGGCCTAACCTCCCCAGACTTC
CCCATGTGTTGGGAGCTGTCCTTCCCCTGCACCTGCTGCCAGATGCTATGGGGGGAGTGTTTGCTCCTCACTCTTCTCCCATGTTCCCAGGACTGCC
TGCGGGCCTGTCAGGAGCAGATCGAAGCTGCACTCAGGGAGAGCCTCAGGGAAGCCGCTCAGACCAGCTCCAGCCCAGCGCCCAAAGCCCCCCGGGG
CTCCAGCAGCCAAGGGCCCAGCCAGACCAGCACTCCTACAGATGTCACAGCCATACACCTGTAGCCCTGGAGAGGCCCTCTGGAGTGGCCACTAAGC
AGAGGAGGGGCCGCTGCCACCCACCTCCCTGCCTCCAGGAACCACACCACATCTAAGCCTGAAGGGGCGTCTGTTCCCCCTTCACAAAGCCCAAGGG
ATCTGGTCCTACCCATCCCCGCAGTGTGCACTAAGGGGCCCGGCCAGCCATGTCTGCATTTCGGTGGCTAGTCAAGCTCCTCCTCCCTGCATCTGAC
CAGCAGCGCCTTTCCCAACTCTAGCTGGGGGTGGGCCAGGCTGATGGGACAGAATTGGATACATACACCAGCATTCCTTTTGAACGCCCCCCCCCCA
CCCCTGGGGGCTCTCATGTTTTCAACTGCCAAAATGCTCTAGTGCCTTCTAAAGGTGTTGTCCCTTCTAGGGTTATTGCATTTGGATTGGGGTCCCT
CTAAAATTTAATGCATGATAGACACATATGAGGGGGAATAGTCTAGATGGCTCCTCTCAGTACTTTGGAGGCCCCTATGTAGTCCGTGCTGACAGCT
GCTCCTAGAGGGAGGGGCCTAGGCCTCAGCCAGAGAAGCTATAAATTCCTCTTTGCTTTGCTTTCTGCTCAGCTTCTCCTGTGTGATTGACAGCTTT
GCTGCTGAAGGCTCATTTTAATTTATTAATTGCTTTGAGCACAACTTTAAGAGGACGTAATGGGGTCCTGGCCATCCCACAAGTGGTGGTAACCCTG
GTGGTTGCTGTTTTCCTCCCTTCTGCTACTGGCAAAAGGATCTTTGTGGCCAAGGAGCTGCTATAGCCTGGGGTGGGGTCATGCCCTCCTCTCCCAT
TGTCCCTCTGCCCCATCCTCCAGCAGGGAAAATGCAGCAGGGATGCCCTGGAGGTGGCTGAGCCCCTGTCTAGAGAGGGAGGCAAGCCCTGTTGACA
CAGGTCTTTCCTAAGGCTGCAAGGTTTAGGCTGGTGGCCCAGGACCATCATCCTACTGTAATAAAGATGATTGTGAAATAAAACTGGCTTTGGCTTC
TTGGATTGGTGTGTGGGTAAGTCTATTTCTGCACTGTATGAGGTAAGGAGGTGGAAGTCAATGGTCTAAAGCAGGGATCATTGAGCCTTTTCTGTAA
AGGGCTGGATATTTAGGCTTTGTGGGGTACATGGTCTCTGACCCAAATATAGTCAGTTCTGCTTTATAATGTGACCTATGCGTTCCTAAAAATCACT
ATGCCATGCAAAATTGCACAATAAAGACCACAGGTCTCATGGGAAAAATGGGGCTTGAAGCACAACACTCAAATGAGTGACACATTTAAAAAAAAAG
GATAGCTTGGTTTTTACATATGTCAAATGGTTGAGAAATTATATCACAATAAATATGGCCTTTTATCTTGAAGACATGCACTTTGCTTTTGGAAGTG
GACGTCGGAAGGGTTGCTCAACACAGGTGGGGAGATGAGTGAGGTAGCTGGTACATGTTTAGGTGTGAGTTTTGTGTACTACTTAGGCTTGGTTCAG
CTAGATACAGTTTCCCATATTCACCTACTATTTCTCGAGGATGAAATCACACACAAGCAAACATGAAGTCTGCGTTATGATCAAACTGTTCCCAAAT
ATATTAAATGGGTTGGAACAAATGCGCAATTTCGAAAGCAAATAACAAGGGTTATAGCAGGATTATACTTAAACTCTGCTGTTGTAGCACAAAACCA
GCCACAGAAAACATGTAAATGGGTGAGCATGGCTGTTCCAACAAAACTATTTATGGATGCTGAAACTGGAATTTCATGTAATTCCTACCTATCACAA
AATACTGTTTTAATTTTTTCCCCATTTAAAAATGGAAAAATCATTCTTAGCTCATGGGCCACACAAAAATGGGCACTTGGGCTGGGTGCAGTGGCTC
ATGCCTGTAATCCCAGCACTTTGGGAGGCCGAGGCGGGTGGATCACCTGAGGTCAGGAGTTTGAGACCAGCCTGGCCAACCTGGTGAAACCCCTTCT
CCACCCCGTCTCTACTAAAAATACAAAAATTAGCCAGGCGTGGTGGCACGCACCTGTAGTCCCAGCTACTCAGGAGGCTGAGGCAGGAGAATCTCTT
GAACCATGGAGGCGGAGGTTGCAGCGAGCCGAGATCATGCCACTGTACTCCAGCCTGGGCGACAGAGCGAGACTCCGTCTCAAAAAACAAATCAACA
AAAAAAGGGGCACCTGGCCCTAGTTTACTAGTCACTAGTCTAAAGCTTTCATTGGCTGAAAAGCCAGAAAGGGAGCCTGTTTGATGCTAGCTCTGAT
CTAACCATTCTTGGGCCCAGCCTTATTCTCTGGCCTTTTTTTTTTTTTTTTGAGACAGTCTTGCTCCGTGGCCCAGGCTGGAGTGTAGTGGCCCCAA
TCCTGGATCACCGCAACCTCCACCTCCCAGGTTGAAGCGATTCTCCTGCCTCAGCCTCCCAAGTAGCTGGGATTACAAGCACACGCCACCACACCCA
GCTAATTTTTGTATTTTTAGTAGAGAAGGGGTTTCACCATGTTGGCCAGGCTGGTCTCGAACTCCTGAACTCAGGTAATCCACCTACCTCAGCCTCC
CAAAGTGCTGGGATTACAGGCGTGAGCCACCAAGCCCAGCCTCTCTGGCCTTTCTTGACTCTTATCTCTGCTTTCCCCAAGGAGTTTTCTCTTGTAG
TCCTTTCATCCACTGCTGAGACACGACCATCTTTGGACAACCTGCTCCTGGCTGCTGTAGCCTGTGATGGGGGAAGGCAGAGGATGTGTCCCCTGGG
GGCTAACAAGGTGAGTGCAGCCTGGAGAAACAAGCTTGGAGATCAAGGGAGGTGGGTCCTATATAAACAGGACAAGAATGTCCTCCGTCCTCCAAAT
ACTAACAGGAGTAATGCCTACCTCCATTGACTACACCAAACACAGAGGTTCAATAAATATCTGTCTTTGCCTTTATCCACAGTGACCTGACACAATA
GCCATAGAAAAAGTACTCACACCAAGCCCCAGCTGGGGACTGGGAATGCTAGCATATGGTATCTCAAGTTGGCTCTCAGAACTAAACAGGGATAAGG
GCCTAGAATGGAAGAGGGAACCAGCCAGACCCTCAGTCCTTCCTGTCCTGGACTGGGAGCCACAGATGTCCCTGTGATCTGTCACTGCCCTGATCTG
GGTCTTCAGCCATTAAAGCTCAGTGTCATCTTCAGTCACCAACGGGGGTCTTGGTGTCCTTCCAAACCCCTTTGGCCAGGACAGCTGACTGTTTTCC
TCACTCCACGGTGATGGGAACATCTTCCACATCGCGGGGGACTGCACTCTGAAGCTCACGCCTGATTTCGGGCGATAGCTGTGGATGGGGCTGCAGC
CGGAGCAGTTCTAAGAGGGCCTCTTTCTGGTCTGTGGCCAAGTCGGCCTTGTAGCGCTGGACCAAAGTCAGGAGGCACTGGTGCCACAGCACAGGCA
GTTCACGCTTCTCTGTCCGGAACCCCAGGAAGTGGAAGACTAGGGCATCCAGCACCCGGTAAGGCAGTGCATACTTCTTATCCAGCAGCAGTCGCAG
GAAGATGCTGTTGGCACCGCTGTATTCCATCTCAGCAATTTTCAGCATGGCCGCACTAGTGGGAAAGGGAGGTGGGGTAGAGTAAGCAGGGAAAACA
TTGGAAGAAGGATCCTACTTCTCCCTCTATGCTTTCCCCTTTTTTTCTTCCCCTCTGCTGGCCCTTACACTATGGTATTCCCCAGGGACCTTCTCAC
CTACACAATCATATTATACTCCCTTGACCTCAGTCACCATCTCTACAGGGATCCACCCAAATCTCTATCTCTAGCATAGACTGCTTGTTTCAGTAAC
CAACTAGAGTATGGTCCAAACATCTCAACGTCTCCACCCTAACTACTTTCTTCCTGTGTTTCCTACTCATTTGTTTATCTATTTACTGAGAACTTAC
TTTATGCCAGGCACTCGGGCCCTGTTGTTGCACAACTTACATTGAGGGGGATAATGATACACCTACTCATTGGCTTAAACAAGCACAAACCCAAGGC
TTTCCTTAGCTCCTTCTCCACTCTGCCCATTCCCAAGTCCTGGCAATTCCACTATCTGGATATCCACTGACCAGCCCCCTTCCACCCCCAGCAATAC
TACCTGGAGTGCAACACAGGGATGGAGCACTTGGTGATGATGCTACCCACAATGATGGCTTCCCGGAGGGTACAAGTGCCAGACTCGCACAGTGGAA
TCAGGATCCCTAGGGAGAGTCAAAGGGCAGCCACTGTGAGCCCAGGATGAGAAAAAGGAGTTACAGCAGGAAGCATTCCCACCCAGCCCAGGGACAG
CTAGCAATTTCCCACACCAGGCCTGCTGTGTTCCCCATAGAAGCTCCAGCCCTTCCCTTTCTTCCGTGCCTCTGGGATCCCACCTTTGAACCAGGCT
CCAGGTTTGAAAAGGGCCTTCTTGAGAGCCATGTAGAGATGGAAGTTGAGTCGTTTGTATTCAGCAACGTCATCTCGTACTCGAGGGAGCAGGACAA
GGTTGTAGAAGCGCTGGGCCATGCGTTCCTTCAGGTTAGAGGCAAAAATCCTAGTGGGAGTTAAGCGGGGGAAGTTTCCAACTCACACGACAGTCTG
GACCCGGCCCATTAAATATCACCATGGATAGTGCATACAAGAGGTTTTAAAGTAAAATATGGGACCTTTCTTTCAGTGGGGGATGTGTGGGAGCTGT
GTGCATGCAACACCCATCAGCTTAGAGAGAGAATAGGAGGGGCAATGAGATATACCCAAATGAGGAGCACCGTTTGTCTGTGGGAGAGCCAGAGCTC
GTGCAAACTGATGGCTACTCAGCATCAGTTCGATTCTGCTAGCCCTGAGCATGCCTGGGCAGTCACAGACTTCTGAGGGTCCTGCTACAGGGTTGTA
TCCCAGTGGCTATAAAAGCCTGTCCCCTAGAAATTCATCACAGAGGGTTGTATCCCAGTAGCTATAAAAGCCTCTCCCCTAGAAATTCATCACGGAG
GGTTCCTAACTGGCTAACTGGGTCTTGGCCCCAAAAAATGACACAGGAAAAGCTAGAAAAATGATGCTATAAAGTAGCACAGAGAGGGCCCTGGGGC
AAAGCTCAAATGCCCTGGGGCCAGAGGCAAGGAAAGCCTGTCCGTCCCAAACTCAGCCTGCACCTATAAACCCAAGGCCCCCGAACCCCCAGCTACT
CTACCTGGTGGCCTGGTACATGGCAGCTGCAGTCCAGGCCTCCGGCTCTGTGACGTAGAGGATTTGCTCCCAGTTGGAGAGTGCAGGGATGATCTTA
AATGCCTTGGGCAGTTTTCCACTGCGGTACTTAGATAATACCTAGGGATGAGGGAGGTAAAACAATCATCGTCATCCACATATGGCAAGCTTGCTGT
GGGCTAGGAACTTGTCTGGGTGCTTTTAATATATTAACTCATTGCATCCCCACAATAACCTATAAGGAGGTGCCATTATTATGCTCATTTTACAGAT
GACCAGTGAGAGTTCCAGTAACCGACCCAAGGATGCCAAGTCATTTACAGGCAGAGCAGGAATCTGAACCCACACACTCTGCCTCTTAGGTCTGTTT
TCTACTCCCATGACTTCTTTAGTATGCGATGCAGGCAAAAGGCAAAAAAGCCTGTGGCAGGAGCCCACAGCCCCCAAAGGGGTCTTCCACCATGGCT
CCCCTCTCAGCTCTTACCTCCCGGACCCCCCTGTACACTTCTAGGACCCGGGGGTCCAGCTGGGGCATAGGGAAGCCCGACACCTCTGACATGACTG
TCTCAACCTCTGTCTGCTTCTCAGTCAGCTTCTCCATGATGATGTCAGCCAGGGTGCGCCTAAGAGGGGAAGTGCCAAGAGGAGGGGAGAGAGGGGG
CAAGGAGCACTGTGGTCACTGTCCAGGAAGCTCCAGACTCCCCACAGTCCCCTGTGAGCACCGCCATACTGCGATCCTGCTGGGATATGCAGCTTAG
AGTTCTCTCTCTGTGCCCATTCATCCACCACAGACAGAATCACTGCAGGGTGCAAAGGAACTGAAAGTCATTCCATTTAGGACAAAGCTAGCAGTTG
TACGGAGGTTATTATGAACCTCAACTCTGAAGTCAGTCTGCCCAGGTTCAAATCCTGGCTCACCCACTCCCTGGTATGATCTTGGGCATGTTACTTT
ACCTCTCTATGCCTCTGTTTCCTCATTTGTAAAATAGGGATAATAACGGTACCCACCTTAAAAGATTAATGGAAGGATTAAATAAGTTAATGTCTGT
TCATTACTTGGAATGGTCAGTACACAGTAAGCGTTATCTATGGAAATATTTCTAAGACTGATTATATTCTTTTCAGCCTCCTTAAACAGTATTGTTG
GGTGTATCAAACATAATCTTATCTTAATGATTCAGAATTACCATCGCCTTGAGCTGTCATATAATACTAGCATCTTCAGAGGCTGCTGAAGTGTATT
TATTTATTTTTTTTGAGAGAGAGTCTACCTCTGTTGCCCAGGTTGGCATGCAGTGGCACCATCATGGCTCACTGCAGCCTCTATCTCTCTGGCTCAA
GCGATCTTCCCGCCTCAGTCTCTCGAGTAGCTGGGACCACAGGAACATAGTACAAGGCCCAGCTAGTTTTTTATTCTTCTGTAGAGATGGGGTCTCC
CCATGTTGCCCAGGCTGGTCTCACACTCCTGGGCTCCTGCCTTGGCGTCCCAAAGTGCTAAGATTACAGGTCTGGGCCACCATGCCCAGACTGAAAT
GTATTTAAAGCTGCTTCTCAGTTGGGCGCAGTGGCTCACGCTTGTAATCCCAGTACTTTGGGAGGCTGAGGGAGGTGGATCACGTGAGGTCAGGAGT
TTGAGACCAGCCTGGCCAACATGGTGAAACCCTGTCTCTACTAATAAAACAAAAATTAGCCAGGCGTGGTGGTACGTGCCTGTAATCCCAGCTACTC
GAGAGGCTGAGGTTGCAGTGAGCTGAGATCATGCCACTGCCCTCCAGCGTGGGTGACAGAGTGAGATCCTGTCACAAAACAAAACAAAAAACAAACT
GCTCCTCTTTTCTGAGGTCCTACTCAATGCCAGGCACTGAGTTTGGGACTTTTCAGTCCTAGAGTCAGCGCAACACTTATAGGACACGGAAACTTAT
GCAGACATGGGAACTGGGCCTCAGGTTAATAACTCACCCAAGGCCTCACAGCTGTCAGGTGGGGGTAAGAGTCAAACTCAGGTTTTTGGAAGTCTTG
AGTTAAGGTGCTTTATAGTACCTTATAATGTGCCCCCAAACTAAATGGCCTCTGATTGTTGAATTCATGTGGATCTAGGCTTGCTTTCTGAAGATGC
CAGCTATCATTTCTTACGACTGCCAGGAGTTCTGATTACTTCAAGGAGCTTGTCTACTCTATTTACTACAAGCTGGAAAAGCATTCTGCTAAATTGG
TCAGCATTATCAGTGAAGTAGGAGTTATGAGGTGCTGAGTGAGAACCTGAGAGGCTCTCTGGGGGGACAAGCCCAAGTACATACTTTATGACATATA
TTTCAACTGTTAGGCATCAATCTGGGAGAGGGGCTCATTTTCATTTCTTCATTCTGCATTTTCAAATAAGCTGCCACAGAATTTATCAGCCTCCCTG
TCCTTTTATAGTATGATTAGCAATGAGATGCATTAGCCCAAAACAGCCTAAAGTATCAGGGACACCATTATGTTAATATCACAGGGTCAGAATGAAC
TGGTTGAGGACCCTTATCCTAGACTCCACTCCCAAGGGCCAAAATTTATGGGCTCAGGAGTTTGACCACAGGCAGTCTAAATGCCTGCATGTTTTGG
AGCTAGCATTTATTATAGATGGGAATAAATTAGTGGTCCTGACTAGGGGCAGTCTTGCCTCCCAGAGGACATTTGGCAATGTCTGATGTCATTTTTG
GTTTTCACAACTGGGGGAAGGTTGCTACTGGAGTCTAGAAGTAGAGATCAGAGATATCTACTAAACCTCCTACACTGCACAGGACAGCCTCCACACA
CACACAAAATTACCCAGCCCAAAATGTCAATAATGCTGAGGTTGAAAAACCTTGGCTTAAATGAAGCTTAGGATATGAAGACTTGTCCAAGGAAGTT
GAGCTTACCGCTAAAAAAACTAAGAATACCAAAACCAAATGCAATAGGATGGCTCTCCCCAGAGGTGTAAAAGGGGCCTGGAACTGTTTCCCTGGCA
ACTGGGCAGTTGTACAACAAATGGACATAAGGACACAATGTTTTTTGAGGCTGGGTCATTCCTACTCACAGTGGTCCTTTGAGGATGGGCCAGTTTT
GTCAAGGTGGTCCCCTACAGCTAGCAACTCCAGGGCCCTTTCCAAAGGTAGGGAATCATAAGTCTGCCAGGGAACTTGTTTTCCTGTGGGAACTTTC
TACAAGGACTCATTATCCCAAATCCCCAGGCCTACCTGGCAGGAGGGTTCTTGTTCATGAACATCTCTATGGCACGCTCATCCTCAGGGTCCACAAC
CACCTCTGCATGATGGCCCGCTGCTGTCATTGTGGCAGCCTTCTCCAGGGTGGGCCACTCCTCGTCCTCGTCATCTGATCCATCCTGAGGCATTCTT
GGACCTAGAAGAGGGGAGACTAAATGGATGAGCACAGCAAAAGGTAGCTGAGGGATTTCGTCAGTTTAACTTTAGCCATTATGTAGTACAGGCCTCA
CATGTGGTTGTGATAGACGCAGGTATGTGCAGTGAAACAAATGCATTAGCTCCCTGTCCCCAGGGGCTTGCAATCATGCTTGAGAAACAAAATGTAT
ATACAGGAAACAATAAGAAAAGCAATGGCCATAAATAATAGTTAACATACCATACTCAGTTATGTAGAAGGAACTTTTTTTTTTTTTTTTGAAATGG
AGTCTTGCTCTGTCACCCACACTGGAGTGCAGTGGCTGGATCTCAGCTCACTGCAAGCTCCGCCTCCCGGGTTCATGCCATTCTCCTGCCTCAGCCT
CCCAAGCAGCTGGGACTACAGGCATAAGCCACCAGCCCGGCTAATTTTTTGTATTTTTAGTAGAGTTGGGGTTTCACCATGTTGACCAGAATGGTCT
CGATCTCTTGACCTCGTGATCCGCCCGCCTTGGCCTCCCAAAATGCTGGGATTACAGGGCGTGAGCCACTGTTCCCGGCCTGTAGAAGGAACTTCTA
AACACTATACCCATGTTAACTGTTTAATCCTTATAAACCCAAGAAGTGGCGGGCANNNNNNNNNNNNNNNNNNNNACGGTGGCTCACGCATGTAATC
CCAGCACTTTGGGAGGCCGAGGCGGGCAGATCACGAGGTCAAGAGATCGAAACCACCCTGGTCAACATGGTGAAACCCCATCTCTACTAAAAATACA
AAAATTAGCTGGGCGTGGTGGTGGGCGCCTGTAGTCCCAGCTATTTGGAAGGCTGAGGCAGGAGAATCACTTGAACCCAGGAGGTGGAGGTTGCAGT
GAGCCAAGGTCACGCCACTGCACTCCAGCCTGGTGACAAAGCGAGACTCCGTCTCAAAAAATATATATAAAATTAAAAAAAATAAAATAAACCTTCT
TATGGAACAATGGCAAATAAATAAATAAATAAGAATAAACCCAAGAAGTGGATACTATTACTATACCCAGTTTCAAATGAGGACATTGAAGCACTGA
GAAGTTGGGTAATTTGCCCAAGACAGGTAGTCTGGGTCTAGACTGCATTCTTCACCACTATTCTACACATATTCGGGTTTGATTATATGCCACAATG
AGTAGTAGAGACAACATATGCACTTAAAGGATGAGTGGTGAGGACAGTTAGGAGCTGGATGGGCAGTTTGGGAGCAGAAGGAGTGTGTTCCAGACGC
AGAGAAAATAAGGCTTGGATATAAGAGTCTCCTAGGCAATAGCAAGAAATAATGCTAGGTACGTGGGAAAGGTGAAGCCAGACTGGAGGGCCTTTAA
ATTCAGGCAGTAGAGTTCAGATTTCAATCCACCAGTCCATTTAAATACATGAAGTTGGCTGGGCGTGGTGGCTCACGCCTGTAATCCCACCATTTTG
GGAGACCAAGGCGGGTGGATCATGAGATTGGGAGTTCGAGACCAGCCTGACTAACAGGGAGAAGCCCCGTCTCTACTAAAAATACAAAATTAGCCGG
GCTTGGTGGCGCATGCCTATAATCCCAGCTACTTGGGAAGGCTGAGGCATGAGAATCGCTTGAACCCGGGAGGTGGAGGTTGAGGTGAGGTGAGCCG
AGATCGCGCCACTGCACTCCAGCCTGGGCAACAACAGCAAAACTCTGTCTCAAAAAAATAAATAAATAAATAAATAAAAATAAATAGGCCGGGCGCG
GTGGCTCACGCCTGTAATCCCAGCACTTAGAGAGGCCAAGGCGGGCGGATCACGAGGTCAGGAGACTGAGACCATCCTGGCTAACACGGTGAAACCC
CGTCTCTACTAAAAATACAAAAAATTAGCCGGGTGTGGTGGCGGGCGCCTGTAGTCCCAGCTACTCGGGAGGCTGAGGCAGGAGAATGGTGTGAACC
CGGGAGGCGGAGCTTGCAGTGAGCCAAGATCGTGCCACTGCACTCCAGCCTGGGCGACAGAGCGAGACTCCGTCTTAAAAAAAAAAAAAAAAATGAA
GTTAGTCCATTTAAATAACTTCTGTTTTTGGAAGGCTACATGTCTGGGCATCTGGAAAGGGGTCTAATAATCCAAGTGGGGAGCTATAATGCTACGT
ATCAATAGGTCATTAACAACAAAGGCAGTGTGTGATAAACACTAAATAAGGGGGAACAGACATTTTGTCTCCACGTTCCAACGGTCCCCCAAATTTG
TACTTTGTAGGTGGTTCTCCTTAGTGCCAGACCCTAACTCCAGGTGTCTCCTGTAAGCTGCTCTTGGATGACTCACAGGCACCTCAAATCTCACCCG
TTATCAACTAAACTAATTTTCTTTCCCTCCTAGGTCTACACTGCTAACCATCCACAGCTCAGTAAACGGCACCATCGTCCACCCAATGCTAAGCCTG
GGAGG
HUMAN SEQUENCE - mRNA
GCGCCTGTCAGGGAAGCGGCGCGCGCGCGCGGGCGGCGGGCGGGCTGGGGATCCGCCGCGCAGTGCCAGCGCCAGCGCCAGACCCGCGCCCCGCGCT
CTCCGGCCCGTCGCCTGCCTTGGGACTCGCGAGCCCGCACTCCCGCCCTGCCTGTTCGCTGCCCGAGTATGGAGCTGCTGTGTTGCGAAGGCACCCG
GCACGCGCCCCGGGCCGGGCCGGACCCGCGGCTGCTGGGGGACCAGCGTGTCCTGCAGAGCCTGCTCCGCCTGGAGGAGCGCTACGTACCCCGCGCC
TCCTACTTCCAGTGCGTGCAGCGGGAGATCAAGCCGCACATGCGGAAGATGCTGGCTTACTGGATGCTGGAGGTATGTGAGGAGCAGCGCTGTGAGG
AGGAAGTCTTCCCCCTGGCCATGAACTACCTGGATCGCTACCTGTCTTGCGTCCCCACCCGAAAGGCGCAGTTGCAGCTCCTGGGTGCGGTCTGCAT
GCTGCTGGCCTCCAAGCTGCGCGAGACCACGCCCCTGACCATCGAAAAACTGTGCATCTACACCGACCACGCTGTCTCTCCCCGCCAGTTGCGGGAC
TGGGAGGTGCTGGTCCTAGGGAAGCTCAAGTGGGACCTGGCTGCTGTGATTGCACATGATTTCCTGGCCTTCATTCTGCACCGGCTCTCTCTGCCCC
GTGACCGACAGGCCTTGGTCAAAAAGCATGCCCAGACCTTTTTGGCCCTCTGTGCTACAGATTATACCTTTGCCATGTACCCGCCATCCATGATCGC
CACGGGCAGCATTGGGGCTGCAGTGCAAGGCCTGGGTGCCTGCTCCATGTCCGGGGATGAGCTCACAGAGCTGCTGGCAGGGATCACTGGCACTGAA
GTGGACTGCCTGCGGGCCTGTCAGGAGCAGATCGAAGCTGCACTCAGGGAGAGCCTCAGGGAAGCCTCTCAGACCAGCTCCAGCCCAGCGCCCAAAG
CCCCCCGGGGCTCCAGCAGCCAAGGGCCCAGCCAGACCAGCACTCCTACAGATGTCACAGCCATACACCTGTAGCCCTGGAGAGGCCCTCTGGAGTG
GCCACTAAGCAGAGGAGGGGCCGCTGCCACCCACCTCCCTGCCTCCAGGAACCACACCACATCTAAGCCTGAAGGGGCGTCTGTTCCCCCTTCACAA
AGCCCAAGGGATCTGGTCCTACCCATCCCCGCAGTGTGCACTAAGGGGCCCGGCCAGCCATGTCTGCATTTCGGTGGCTAGTCAAGCTCCTCCTCCC
TGCATCTGACCAGCAGCGCCTTTCCCAACTCTAGCTGGGGGTGGGCCAGGCTGATGGGACAGAATTGGATACATACACCAGCATTCCTTTTGAACGC
CCCCCCCCCACCCCTGGGGGCTCTCATGTTTTCAACTGCCAAAATGCTCTAGTGCCTTCTAAAGGTGTTGTCCCTTCTAGGGTTATTGCATTTGGAT
TGGGGTCCCTCTAAAATTTAATGCATGATAGACACATATGAGGGGGAATAGTCTAGATGGCTCCTCTCAGTACTTTGGAGGCCCCTATGTAGTCCGT
GCTGACAGCTGCTCCTAGAGGGAGGGGCCTAGGCCTCAGCCAGAGAAGCTATAAATTCCTCTTTGCTTTGCTTTCTGCTCAGCTTCTCCTGTGTGAT
TGACAGCTTTGCTGCTGAAGGCTCATTTTAATTTATTAATTGCTTTGAGCACAACTTTAAGAGGACATAATGGGGGCCTGGCCATCCACAAGTGGTG
GTAACCCTGGTGGTTGCTGTTTTCCTCCCTTCTGCTACTGGCAAAAGGATCTTTGTGGCCAAGGAGCTGCTATAGCCTGGGGTGGGGTCATGCCCTC
CTCTCCCATTGTCCCTCTGCCCCATCCTCCAGCAGGGAAAATGCAGCAGGGATGCCCTGGAGGTGGCTGAGCCCCTGTCTAGAGAGGGAGGCAAGCC
CTGTTGACACAGGTCTTTCCTAAGGCTGCAAGGTTTAGGCTGGTGGCCCAGGACCATCATCCTACTGTAATAAAGATGATTGTGAAATAAAACTGGC
TTTGG
HUMAN SEQUENCE - CODING
ATGGAGCTGCTGTGTTGCGAAGGCACCCGGCACGCGCCCCGGGCCGGGCCGGACCCGCGGCTGCTGGGGGACCAGCGTGTCCTGCAGAGCCTGCTCC
GCCTGGAGGAGCGCTACGTACCCCGCGCCTCCTACTTCCAGTGCGTGCAGCGGGAGATCAAGCCGCACATGCGGAAGATGCTGGCTTACTGGATGCT
GGAGGTATGTGAGGAGCAGCGCTGTGAGGAGGAAGTCTTCCCCCTGGCCATGAACTACCTGGATCGCTACCTGTCTTGCGTCCCCACCCGAAAGGCG
CAGTTGCAGCTCCTGGGTGCGGTCTGCATGCTGCTGGCCTCCAAGCTGCGCGAGACCACGCCCCTGACCATCGAAAAACTGTGCATCTACACCGACC
ACGCTGTCTCTCCCCGCCAGTTGCGGGACTGGGAGGTGCTGGTCCTAGGGAAGCTCAAGTGGGACCTGGCTGCTGTGATTGCACATGATTTCCTGGC
CTTCATTCTGCACCGGCTCTCTCTGCCCCGTGACCGACAGGCCTTGGTCAAAAAGCATGCCCAGACCTTTTTGGCCCTCTGTGCTACAGATTATACC
TTTGCCATGTACCCGCCATCCATGATCGCCACGGGCAGCATTGGGGCTGCAGTGCAAGGCCTGGGTGCCTGCTCCATGTCCGGGGATGAGCTCACAG
AGCTGCTGGCAGGGATCACTGGCACTGAAGTGGACTGCCTGCGGGCCTGTCAGGAGCAGATCGAAGCTGCACTCAGGGAGAGCCTCAGGGAAGCCTC
TCAGACCAGCTCCAGCCCAGCGCCCAAAGCCCCCCGGGGCTCCAGCAGCCAAGGGCCCAGCCAGACCAGCACTCCTACAGATGTCACAGCCATACAC
CTGTAG

[0297] TABLE VII

MOUSE NOMENCLATURE
ICSGNM Wnt3
Celera mCG19162
HUMAN NOMENCLATURE
HGNC WNT3
Celera hCG27972
MOUSE SEQUENCE - GENOMIC
NNNNNNNNNNNNNNNNNNNNNNNNNNNNNNNNNNNNNNNNNNNNNNNNNNNNNNNNNNNNNNNNNNNNNNNNNNNNNNNNNNNNNNNNNNNNNNNNN
NNNNNNNNNNNNNNNNNNNNNNNNNNNNNNNNNNNNNNNNNNNNNNNNNNNNNNNNNNNNNNNNNNNNNNNNNNNNNNNNNNNNNNNNNNNNNNNNN
NNNNNNNNNNNNNNNNNNNNNNNNNNNNNNNNNNNNNNNNNNNNNNNNNNNNNNNNNNNNNNNNNNNNNNNNNNNNNNNNNNNNNNNNNNNNNNNNN
NNNNNNNNNNNNNNNNNNNNNNNNNNNNNNNNNNNNNNNNNNNNNNNNNNNNNNNNNNNNNNNNNNNNNNNNNNNNNNNNNNNNNNNNNNNNNNNNN
NNNNNNNNNNNNNNNNNNNNNNNNNNNNNNNNNNNNNNNNNNNNNNNNNNNNNNNNNNNNNNNNNNNNNNNNNNNNNNNNNNNNNNNNNNNNNNNNN
NNNNNNNNNNNNNNNNNNNNNNNNNNNNNNNNNNNNNNNNNNNNNNNNNNNNNNNNNNNNNNNNNNNNNNNNNNNNNNNNNNNNNNNNNNNNNNNNN
NNNNNNNNNNNNNNNNNNNNNNNNNNNNNNNNNNNNNNNNNNNNNNNNNNNNNNNNNNNNNNNNNNNNNNNNNNNNNNNNNNNNNNNNNNNNNNNNN
NNNNNNNNNNNNNNNNNNNNNNNNNNNNNNNNNNNNNNNNNNNNNNNNNNNNNNNNNNNNNNNNNNNNNNNNNNNNNNNNNNNNNNNNNNNNNNNNN
NNNNNNNNNNNNNNNNNNNNNNNNNNNNNNNNNNNNNNNNNNNNNNNNNNNNNNNNNNNNNNNNNNNNNNNNNNNNNNNNNNNNNNNNNNNNNNNNN
NNNNNNNNNNNNNNNNNNNNNNNNNNNNNNNNNNNNNNNNNNNNNNNNNNNNNNNNNNNNNNNNNNNNNNNNNNNNNNNNNNNNNNNNNNNNNNNNN
NNNNNNNNNNNNNNNNNNNNNNNNNNNNNNNNNNNNNNNNNNNNNNNNNNNNNNNNNNNNNNNNNNNNNNNNNNNNNNNNNNNNNNNNNNNNNNNNN
NNNNNNNNNNNNNNNNNNNNNNNNNNNNNNNNNNNNNNNNNNNNNNNNNNNNNNNNNNNNNNNNNNNNNNNNNNNNNNNNNNNNNNNNNNNNNNNNN
NNNNNNNNNNNNNNNNNNNNNNNNNNNNNNNNNNNNNNNNNNNNNNNNNNNNNNNNNNNNNNNNNNNNNNNNNNNNNNNNNNNNNNNNNNNNNNNNN
NNNNNNNNNNNNNNNNNNNNNNNNNNNNNNNNNNNNNNNNNNNNNNNNNNNNNNNNNNNNNNNNNNNNNNNNNNNNNNNNNNNNNNNNNNNNNNNNN
NNNNNNNNNNNNNNNNNNNNNNNNNNNNNNNNNNNNNNNNNNNNNNNNNNNNNNNNNNNNNNNNNNNNNNNNNNNNNNNNNNNNNNNNNNNNNNNNN
NNNNNNNNNNNNNNNNNNNNNNNNNNNNNNNNNNNNNNNNNNNNNNNNNNNNNNNNNNNNNNNNNNNNNNNNNNNNNNNNNNNNNNNNNNNNNNNNN
NNNNNNNNNNNNNNNNNNNNNNNNNNNNNNNNNNNNNNNNNNNNNNNNNNNNNNNNNNNNNNNNNNNNNNNNTGGCTGCCAGCAACCAGGCCCTTCT
GGGGCCAGTTCCCTCCGGGCAGATAGATCAGCTGGCCCCAGGGGTGCAGGATCCGAGGGGTCAAGCCCCCAGAGTGGCAGCTTTGTGTGATGGAATG
AGGCTTAAACTCCAGTTGGCAACCTTCAGTACATTCATGGGGGCAGCCACCACTGTGTGCACACAAACAAGCACCACTGTGCGCACACAAGCAAGCA
CCTCTGTGTGCACACGAGCAAGCACCACTGTGTGCACACAAGCCAGCACCACTGTGTGCACACAAGCAAGCACCACTGTATGCACACTAGCATCACT
GTGTGCACACAAGCCAGCACCACTGTATGCACACAAGCCAGCACCACTGTGTGCACACGAGCACCACTGTATGCACACAAGCCAGCACCACTGTGTG
CAACCAAGCAAGCACCACTGTGTACAAACAAGCACCACTGTGTGCACCCAAGCAAGCACCACTGTGTGCACACAAGCAAGCACCACTGTGTGCACAC
AAGCATCACTGTGTGCACACAAGCAAGCACCACTGTGTACAAACAAGCACCACTGTGTGCACACAAGCATCACTGTGTGCACACAAGCAAGCACCAC
TGTGTACAAACAAGCACCGCTCTGTGCACACAAGCAAGCACCACTGTGTACAAACAAGCACCGCTCTGTGCACACAAGCAAGCACCACTGTGTGCAC
ACAAGCAAGCACCACTGTGTGCACACAGGCACATGTGCATGCTGCACCCCAGCTTTCTCTTACCCACCTCCTTCTGGGACCCTGAAATCTCTGTGAC
TGCTTGGAACATGCTAAGAGGTCCATGGACACCACCCAGTCCTGTGAGTAGTAAGTACCTCCTGGGCTAGATATGACCCTCACCTATAGCAAGTGTC
CGCAGAAGGCTGAGGTAGCCACTTCTAGGGACCCACAGCTGAGTTCCTGTTCAGTGCCCTGGTCTGTCCTGCAAGGTAAGGACATCAAGGATAATGA
CCATTAGTAATGGTGGAGAAACGAAGCATCTAGTCTAGTTAGCTGTCACGGCCAAAAGGACTCTTAATTAGGCCACGTTAATCTATAGGAAGGGTCA
TAGTCAAAGAGGGTAAGTGAGCATGCAGCCCAACGACAGAAAATCGGCCAGGGACCCCTTGGCTCCCCACCCACATCCTCCCAGCTCTCACATTCTG
ATGGAGGACAACAGGTAGAGACTAACAGCTTTTCTGGGCCCTGGACTGTCTACCTTGTCTGAAGTCTACAGTGTCTGAAGTAGGTATCTGAACTTGA
CCCAGCCCTCTTCCTCGCCTTCCTCCTCCCACTCCTGAAGAAGAAATTCTCACAGACCAAAGAAGTGATCAaGGCATCGCCAGGCTCCTCTGGCAGC
TGAGAGGCCGTCACGCTTCCTCCTTACTGGGAATATCTGGGTCGCAGAGGCCTCCGTATGACCCATACTTTCACCCCACTTACTCGTAAGGCTGGAT
TGGTGTCCCCAAATATGTCCAATACTTTGAGACGGGGTGGGGGTGGGGCCTCATGGCCATGGAGATTCCAGATGCAGAGGAGGGAACTCAGTGCCAC
CTTTGGCTGTAAGGAACAGCCTCAATTGGGATTAGGAAAATACACCATCTTGAATCATAAACAAACAAACAAACAAACAAATAAATAAATAATCTTG
AATCACAAACAAACAAACATTCCAAGACGGGATTCTCAGGGCAGTTAATGTCTCAGCAGTGGCTCAAGAGACTCAGTTTCTCCCACCCTGGTCTTAA
GTCTCTACTTTGGTCTCAGTCAGTTGTTCTCACAGCATCCAACCAAGATATAACAATACCCCAAAGCGGGGAAACTGGACAGCAATTTAGCGGACTG
CTCACTCCCCTAAATACTTTCTAGAAATCACAGGTCCGTCAGCTGACTCCCCTTCGTGTCTCCTTTGAGTCGGTGTAGCCCAAGCCCTTGCAAATTG
ACTCAGACTAGTCAGCATXTATCTCTGAGCCAGGTGGGGGAGAACAAACTTGGTTCCTCATGTGCCTAAATAAAGCCTCTGCCTTTACATATACTTT
TATATACATATATGTGTATATATATCATCCTAGTCAGGATTTCTACTGCTGCACAAAACATCATGACCAAGAAACAAATGGGGGAGGAAAGGGTTTA
TTTATCTTATACTTCCACATTGCTGTTCATCCCCAAAGGAAGTCAGGACTGGAACTCACACAGGGCAGGAAGCAGGAGGCAGGAGCTGATGCAGAGG
CCATGGAGGGTGCTGCTTACTGGATTGCATCTCCTAGCTTGCTCAGCTTGCTTTCTTATAGAACCTGGGACTGCCAGCCCAGGGATGGCACCCCCCA
CAGTGGGCCCTCCCAGCCTTGATCACTAATTAAGAAAATGCCTTATAGCTGGATCTGATGGAGGCATTTCCTCAAGGGAGGCTCCTTTCTCTGTGAG
AACTCCAGCTTGTGTCAGGTGGACACAAAACCAGCCAGTACAGTTACTTGCAACCATAAGTAACTCCAGTTCCAGGGATCCTGACCTCTGCAGGCAT
CGAGCAGGTGGATGGCATACATGCATACAGGCAAAACACTCGTACGTGTAAAAGAAGATAAATCCAAAATAGTAATAATAATAAAAAGTAACTCAAA
AGAACTTTCCTCCTCACTCAGCTCAGCTACTGCCAGGAACCATTTCAGAGCCAGCAGGCATCACCACTGCAGGCGAGGGAATAGGCTTAGAGAGCAT
AGGAAACATGAAACATGCCCAGGGTTGTACAGTACGAGGCAGAGCTGGGCTCTAAGGCAACCACTCAGACAGTGTCTCCCTGGACAAACAACCGAAA
TCCCATAGGACAGATCCTGAGAGGCCAGCAATGCTAAGCAGGGTTTGCCCAAGGACCGCCCCCCACCACCTGTGACAGCTATAAACACCTGTTCCAG
GATCTTTGCTGGTGAAGTAGCGAGGGCCCCAGCGACTGTCCACTGAACCATCTACTTGTGTTCAGACTCTTAGCCCCTAGAGCTCATTTCTGGTCCA
ACCTCAGTTTCCCCACGGTGGCTGCTGTTGGTCATACTTGTCTGTGAAGGGATGGTTGGGGGCAGAGATCTGGAGGGTGCAAACCAAGCATGATGGG
CAATTGTCTGCCCTATATCCATGGATCAGACCAGGCTACTCGATCCCCCCCCCCTTTTTTTTAAATAGTGTCCCCACCAGACTCTTCTCCCAAGAGT
CTGGCTGGCTCTTAATTTTGCTGTTTAGAAACATTTGATTTTCTGAGGTATGCCTCTTCCAGGAGAAGGTAAGCCTCATAGACTCAGAACCCTGGGG
CTCAGGCATGCTTACCTGGGGGTTACCTGCATATAGTCCTTCTTAGTGAACAACTAACTACACAGGACACCTATGCAAAGAACACCTGGGACCTCTG
TAATGGCATGCACATGTGTGCACACCACACACACACACACACACACACACACACAGAGAGAGAGAGAGAGAGAGAGAGAGAGAGAGAGAGAGAGAGA
GAGCGATCATTGTGGCTGGAGGGGCTGTCAAGTCTCAGATGCCTCCAGGTGTCAGTGACTTCTGGCCAGGTTGCTATGTTCTCATCTCAAGCCATCA
GGAAAGGTGGGTGTTACCTTGAGGAAAACTGAACCCAACACTGGGGTGGACAGGTCTCCAGGAAGCATTAAAGTGCCTTAAAATACCACACGGAACA
TAAACCCAGGGCCCTCTCATCTGGGATCTCAACACCCTCTCTAAGTCTGTCAGCCTACTCTGTTCTTGGTGCCAGAGTTCTCCTGAGTTCAGTTGGA
TAAAGGGCAGCACACAGCACACAGGCTTAGGTGTGCCATGTGTTAACTCCATGGCAGTGTTAGGGGCTTCTGGCCAGAGCCTAGGGTAGGGGTTGGC
CACTGATGGAGGTGGAGAGACTCTCCAAAGAGATGCTGATGTGGGAGTCCTACAAGGGGCGGGGGCGGGGTGGGTGGGTTGGCCTCTGATACTAGGA
CATGTTAGGGGGAGAGGAGTGCCCTTGTCACAGAAAAAAGAAGAAAGCCAGTGTTTTTTTGTTTGTTTGTTTGTTTGTTTTTTAACCATCCAAGTCA
GCTTTGTGTAGTATTAATGTCTAATGATAAGGACTCCCTGTGAGATAGCTAAGTCCCATTCTCACACCACAATTGAGGGTACATTCAGGGAGCAGCT
ACCTCCACTGGCCTTCATTTCTTCTTCCAAAGGACCCCTTCCAAATTACCCTGGGGACCTGCCGCTGCTGTTGGAGGATCACTGGAAAAAGGGGACA
CCTGACATCTTCAGGTCTGGCAGACCTAGACCTAGAAAGGATACCTGTTCTGGGTGGAAGGCCTTGGGGTATCACAGGTCCACTCCCAGAGATGCCA
ATCTGTATCCCATAAGCCAGTCTGCTGACTGTCTCTAGGGCCTGCAAGTCCTCCCAGGTGACTCAGGGGTGCCTTGAGCCTCTAAGTGGAGCACACT
TGATCCCCAGGTAAGCTCCGAAATTGCACAGTAGATTAAGGGAATTCACTCACAAGGATGCCTCCTTAGCTGAGATCCCCAAAGATCCAGGCTGCAT
AGGACCTGAAGGCTCACTCACTTCTGCTTTCCAGTCAGCAGCAATGTAGCAATGTAGGAGCCAGGCAGCACAGGGAAGGCTCTGAGCTCTGGGACAG
ACACCTGCATCTCTTTGGGTGCTTGGATCCCCCTACTCTTTGGCCTTTCTGCAGGCCACAGGCTTCGACTTCTGAGTCTTCACTTAGGATGATGAGG
CCTACCTGCATGAATAGCGTCGTGTCTAATTTTTGTCTCCGCCAACCCCTCCATGATCCTCCTACTTCCAAGGCCACCTGCTGTCTGGTCTCCTAGC
TGTCTCCAGGAAACTCACCCGAAATCGTTCGAGAGGCTCCTAGAGTTGTTAAGGGAGACCCTTAAAAGCTCCCTTCTCCTGGTCAGAGACCTTGGAG
TCTCCCGTTCCTTCTGGTGTTCTTCTGAGAATCTCTGCTTCAGGTCCCTTGACCTTCGCACCTGATGCCTCCCTGCTTTGCCCACAGTGGTTTTTCT
CCCTCCATTCCTACATTAGGCTAGGTTGGTTCTGAGCCCCCACCCCCATCCCGCAGTTCCCAGAGGGAACAGTCCCAGCAAAAATACATGGAACTCA
GTGCCTGAGTGGGAGATTTCCCCCTCCCTCCTCACGACAGACTGGCAGCCGAGTGAGGGCGGGTGGGGGTCTAGCGGCCAAATTCTTTGTCTTCGAG
GTGCCTCAGCAGGGGTCCGGTGGAGCAGCGCAGAATACACACAGCCGCTGACCGATAACTCCTGGAGAGAGCGCACTTCAAAAGGAACCTCCCGGCA
GCTACTGAGGTGGGGGTGGGGGTCCCCATCTCGGGTCTGAAGTCCCTGTCAGTCACACACAGCACGCAGGCTTCCACGTGCCACATCTTTTGCTGCA
GGTCCTGGGTCCCAGATGCCTTCCCCTCCCTCAACCAGGAGACCACCCTTCCTGTCCAGGGCGAGCCTCATATCCACCCTCATTAGCTGGTTTCAGA
GTAAAAATAATCCTTTCCCGCCATGTGCAGCCTACCCTGATGTTGGGTGCCTATCAAGAGAGAAGATGTGTCTAGGAGATACTCGTGGCAAAGGGGC
TCCCTCACTGCCTGGGCAGGGTCCATTCCTGCGTTGCCACCCGCAGGCAGGAGGAAGAAAATTAAGCCTGTGTTGAAGGAAGGACACCTGGCAAGAG
AGACGAAAGGACTCCGGAATCCCCTCCTCTGGGGAACTTTCAAGTGGGGGGGAAATCCCCACGCAGGCTTCTACTCTGCGGCAGCAACATGCGCGGC
CACTCCCCGCTTCTGGTCCCCTCCTCCTTTCCTTCTTGCACCTTTGCCTGTTTGTTTCCTACCCTCAGAACAGCACCTGGGGCTGCCTCGGGCTCTG
GTTTGCCTGTAAGAGGCACCTGCATACACACAGCCCTTCAAGGGACGACCAGTTTTAGCCACACCAGGACAGCTTCCCACGTATCTCGCAGGCAGCC
AACATCTCACCCAAAGCCACCAAGAGCCTTTGCCCCCGCTCTCTTGGGCTGGCACCTGTGGAATCTTAAGGATCTAAATGACCCCAAGAAGCCCTCC
AGATTAGCTCTTGCCTCCACACCATAGCGGTGTGTTGGAGGCCAGAGAAAGCAACGTCCCTGTTTTCAGAAACACTAATTTTGGACTGCCCCCCCCC
CCGCCCCACGCTCTGATGCAGGACTAGAGATTTAATCCGCATAGATGTTCAGCGGCCTATGGGGAGCCCCCATGGGATGAGCAGCAATCAAGATCTC
AGCTAAAGGCTACCTAGTAACCCAAAAGCCTGTGAAGCAAGCTCCTTGACAGAAGCCTCAGCCCCGGGGCTTTGCATTCCCCGATAGTGGCCAACCC
CCTCCTACTGCCCTCCCAGGTGAATCAGAAACGGGGCCTCAGAATCAGCCGTGCCCCTTGGGGAGGAATCTTCTGGGAATGCCCGGCCCCCGGGGGC
ATTTCTAGGGGTGCTTATCTCAGTACCATCTACCAGCTCCACTAGTCTTCAGCAGGTGGGGGATTGCCTGCTGTTCCTTAGCCCTCCCCACTTCTCC
CCTTCCCCTTTCAACCCCCACCTCTTCCTCTGTCTGGGCGTTCACCCCACCCCCGCCCCTGTTTTCCGTCTCAGTGTCTCTATCCACTTGTCTCTCT
CTATCTCCCCTTCCTCCCCTCTTTCATCTCTCCCTCTACCCCCCTCCAGCCGAGGATCGGGCTAGGAACTCGCAGAAGCTGTGACAAGCCCAGGCGG
CTCTCTCGACCCTTGGTGCCCCCAGGGGCCAGTTCCTTGCTCTCCTTACACCAGCAGAAGCCATGTGCCGAGAACAGACCAGCAGGGGCAGTGGATC
CGAGCTGTGGGCACCAGCCTGCCGGATCAAAGGCTAGGAATGTCTGCTCCCCGTAGGACTTCCCTCAGTCCCATCCACCCCTAACAGCAAGAAAGCC
CGCCATTCCTGGCTAGGCAGGTTTGGGTGGGCTCCCTCTCTTCACCGTCTACACAGTTAAGTCCCACCATGGCTTCTCCTTTGGCTTGCTTTCTAGG
TCCCAAGCCAGGAGCATTTCAAGGGCTGAATGTCTTCTGTGTCCGGGTAGAGAGGCTGAGGTACCTAGGTAAGGGGACTGAATCCTAACAATCTAGG
TATGATTGGGCTCAGACTTAACTCCCAAACTGTGGAGAACTGGTAAGAAGAGTGCCCCTTGGAGGCCTGAACAGTTCCCCTTGTATAAGAGCTTCAG
TAGGTCGTAGGGTGAATCTGGTGTCTGCACGGGACAACGCTTAAACACCAATCGCCAGGTTTTAGTTTCTCATCCGTAGAAGGGTCGGGAATATAGG
TCAGAGACCTGGACATAGGGGAGGTAGATGTTCCTGAAGAGCCCTCGCCCCCAACCACTAATAGACAGAGCTATACCGTGTTTCACTAGTCCCAAAT
GCTTCCATCCTAAGATCCAAGAAACTGCAGGTACTGCTGAGGTCCGGCCAGCACGCCTGCAGGAGGAGAAAGTGACCGAATCCTCCCGCAGGAAATG
CAAACGGCGGCTGGTGTCAGTTGCAGGAAATGCAAAGGCTGCAGGAGGTCGCGATACCAATCTGACTCTTGACAAAAGACTCAAATGACACTAGCTC
TGTCCCCCGGCGCCGCCGGCTGGCAGACCTTCAGAGCCTCAGCGGACTCTCCCGCGCGCCCCTCGGACACCCTGGAAGCGACCTGCGGCCGGGTGGC
AGGGGCCGCCAGCTCGCGAGCCCGAAAAGGCTGGAGACTGGGAGGGGTTGCATTTTCCTAGCCCCTGATCCCAGTCGCGCGATCTGGAAACAACCCC
TTTGCTTTCTAGTCTCGATTCCTTACGGGCCCAAGTGCCAAGGGATCACAGAAAAGGGAGCCACCCATCAATGCCCAAGCCGACCCCTTCACCACGT
GAACGCCGGGTCAAAGCTCCAGCTCCCTAAACCTGGCTCGCGTGGACTGGGAAGGGGGTGTCCCAGGCCAGCAGAGAATCCAGCGTGCCGGGTCCTC
CCGAGGCCTCCGTGCGCCCGGGGCGCAGGCTTTGCCCAAGTTTGCCGGGAGATGCCCTTCCCAGAGCCGGAGTTGTGGGCCGGGCGGGAGGGGCCCG
TGATTGACAGGCTGAACTACAGACTCATCTCTTACCTTAGGCCGCGGGCGCTGATTGGCTGCTCGCTGACATCCTCAAACCCGGCTGCTCGGCGCTG
GGCTCCGGAGGGGGGCGGCTGCGGGTGGAGGTGCGCCTCTGACAAGCCCGAAAGTCATTTCCAACCTCAAGTGGACTTTGTTCCAACTATTGGGGGC
GTCGCTCCCCCTCTTCATGATCGCCGGCAAACTTCCTCCTCGGCGCTGCTTCTAATGGAGCCCCACCTGCTCGGGCTGCTACTCGGCCTCCTGCTCA
GTGGCACCAGGGTCCTCGCTGGCTACCCAATTTGGTGGTAAGACTTGCCTCTTGTCTGCCTGCGGCCCCGATCTCTCGGCCGCACCCGGGGACGGTG
GGAGGCGCTGGCCGGGTCTGGGCTGCAGCAGGCCTGGGGCTCTTTTCTCGTTGCTTCCCGCTAGCCCCCCAGCCGTCCACCCCTCTTGGATCTTCTG
CTGGTGTCGCCTTCCGAATCCAACTCCTGGCTTCTCAGATAATCACCATTTTCCCTGCTACCCGCCGCAGAGGCGGGAGGGCTCTCCCTACCCCTGA
AGGTCTCTCGTTCTTAGTCTTCACCCTCTCCCACCCCAATTTGGGGGTCCCGAAGAACCTTCGTTTGCTCACACTTGCATTTCTGTGCTGTCCCCGC
GGCCCGGCCACTCCTCTTCTCCATTTTAGGGTCTCCGTGGGTAAAATTATCCTGTCCTTTTTCGCCACCGCACCTCTTCGGTGTCTCGGTCAAGAGA
TTTCCCCCACAATACTCGCGTTTGCCTTCATATTTGAGACCTTAAGGGCTTTGGGAATCCCAAGCAGGGGACTTAGGGGGTATTTCAGTAGATTCTC
CCCACTCCGTTCTAGATTAATTTTGAGCCTCTGAAGTGACTATAGAATTTGCTGATCCTAGATGCCATTGCTGATCCGGGTGTATTCGTTCCTTGCT
TGTCCATCCCGGAGAAAAGCGAGGTGGGGGCTCTTTGAAAATGTACTTGTTTGGGAGGGGTAGGCTTGCTGGGTTTTTTTGAGCGAAAACCTAGTTC
TCCATGTCAAATTCGTTGCTTTTGGAAGACGGGGAAGCTAGGAGAAAGGGCGAGGGAAGGGGGAATGCTGTCCCTGAGAAATACGGATACAAAAGGC
ATTTTAGTAAATAAGGCTGGGCGAGCAGGCGGAGTACTTGGAGCTGATGGGTGTGTGAAGGGATTCACTGGAAGATAAACCGCCTTTTGGAAGCCCC
AGCTCCAGAGACTCCCCTGTTTTCCAAGCCTCATTGCTGCTCCTCCTCTGTAGGTCCTCCGGTGGAAGACACTAAAACCAGTTTTCTAAATTACACC
CCAGCCCTCTCAGTCTCCAGCCCCCTGCATTCCGGAAAACTTTAATAAAAGAACCCTCCCCTCCTGGGCAGTGGCTAGAGCCCTGGGGGGGGTGGGA
GGTGAGGAGGAGGAGGAATTTGGGACCTCTGAGTAAGAAGGAGACTGGCCCCTGGGGTGAAAGTTAGAAGTGCTACCAGGGTAAAGTGCTGCCTACA
TGGCCCCCTCCCTGCCTGCTACCTGCAAGCCTGCAGTATGAGGCTCAGAGCTTATAAAATACTGGGCCACACCCCAAGCCTTTTTCCAGATGCTTTG
GGGTGTCTGAAGGCCAGGGGAGGGGGCAGTCATGAACCCAGGCACCCAAGCCATGGCCTGCCCAAGGTTCTGTTTAGAGGGTCCAGGAGTTGCTCCT
TAGGTTGATAAATACGCCAAGGACAGACCATCTTTCTTTCCTGTGGACTTGGGCTGGTCTGGGGCTCCTGTGTGGAGTCTATAGAGCCTGTGCATGC
TGGGGACAGCCAGGGATTCCACAGTGAGGTTCTGCCAATTGGTGAAAGGTTGCCTCTGCCTCCGGACTTTCCTTCCCCCAGCCAAGGCCAAACTCTG
CCTTCTCAGAGACCCTGCGGTGGCGGGTGCATAGGAAGAGAGGGTGCCTGGAGCCCTAGGGATGGCATAGAGGAAAAAGGAGAGAGTGGGCTTGCTA
GTTCTGTGAACTGGAAGAGAGCACTTCCTGGGGCAGTACCAGTAGGTTAGATGGTGGTAACAGTAGCCTCTGTGTGTAGTAATGTCCAGGAATATCT
AGGTAAGGTCCCCATCCGACAAGAAATATTAGGAAAACCTGGAGGGCAGAGACAGGTCCTAACATAACATACATGGCCTGTTTGGGGGTTAAGGGGG
GACCAGATGGCTGCTTTTGTCTGAGCCATAGAGAGTATGTATGGGTATTTTTGAGATGGGTGGTTTGTCAGTGCCTGTGGCTACGACCTCTGTGTGT
GTAATACAGTGTGTGCTCTAGGTCAGTGACCCTAAGTGTCTGTGTACCTGTATGTCTCTGTGGGTAGAAGCTGTTAGTGCCTGAGACCCAGGCAAGT
GTTTTGTGTGAAACCTTTTGGTGTGTGCCTAGGGGATCTGCGGCCCACAGCAGGGTATGCTGTATCTGCATACAAGTATCAGCAAGTGGCTGGTTCT
GTGATGTGACACAGAAGTCGAGAAGTATCCGTTGCTTGTGTAAAGGGGGACCTCCTGGCTTTTGCCTGTGATACTGGACATGGCAGTATTTGTGTTT
GGACTTGTGTGCTGTCTGTGCATGTGTCTGTGTGTGTCCCTTCACCCGCGCATGCCTTCCTGACAGCGTAAGGGGGAGGCCCAACAAATGTCTTTGT
GCGTGAGATCGGTGTTCGTGGCATGACCAGCCATGGTTGGAAGTATGAGAGTGAGCCTGGGAGGCCTGGCTGAGGGCTGTGTCCGGGCCCAGCTTCT
GATCGTGACCCCAAATGCCAGTGACATAGTTTTGTGCCAGTGGTTATGCGTCTGTGGTCATGTTTGCTGACACCTGACTTGTGGGTGTGAAGAATAC
CTGAAAGGGGTGCTTGGTGGCCATCAGTGGCCCTGAGGGGAAAGACAGGCAGGAAGTGGAGGTCTCAGAAGGTGGCTGCAGACACAATCGGTCTGGG
ATCCCAGCTGGGGTGGGGGCAGGGCCTTCCTTGACACCATCAAGCCTTGCTTGCTTGAGGACTGTGGCTACGAGCCTTCCCTCCTCTAAGGTCATTT
CCCTTTCGTCTTGGAGCTGGGGCATGAATCACCTTCATGGGGCTGGAAGTAGAGAGTGGGTAGGCCTCAAATTCTTGATTCCCCTCCTCTGCCCCAA
GGCCGGCAGATTCCAGGCCTTTGAGTCCGTGACTGCCTGCCACCTCTTTGGCCCACCCGGCTCTCACGTTCACCCAGAGGATTTACAGGGGAAATGG
CTTAGCTGGGATTTCTGTCCACATCACCTTCAGAAAGGACCCCTACTCCCAGTAGCCCATCCCTGCTTTTCCTTGCAAGGGCCCCAACTCTGAGACA
AGGTGATGAGGAAGGGGCTCTGAGGGGCCTCTTACTCTAAAAGGAAGCCCTGTGCTCCAGAGCCTCCCAGCCTGGCAGTGGCTCCATTGGAGCAGGA
CCAGTGACAACCAGCCTGCTTTCTAGAACTCTCCTTCATAGTACTAGTTAGCTCCTAGTAAAGAAATCTGTCTTTCTCTTTCTTGAGGAATAAGATC
GTTCTACGGCCTTGCCCTGTGCCATCTGTGCTCCATTGGAAGTGCCCTGAAAAAGGAGGCCTGGTTGGCTGGGTGGTGTTTGGCAGCTCACTTCACA
CTGTGTGGCTGAGGACTGGTGATTCCTCCCCACCCCCCCTTTTGGGGGTCACTTTTCTCACTTTTTACCCAACCTTGCAGTTTAGAGGGGAAATGTT
TTGCTGAGGGCTCCAAGCCTQTTAGGGCGCCTGGGTTCTCATTGCACCACTCCAGAGCCCATCCTCCACCCAAGCACCTATCTTAAGCCCTGCCTCA
GTTTCTCTATGTGTCACATCCTGCTGCCTCCCCTGCTCAACGCCCACCCAACAGCCTTCTCTCCGAGGCTTGGGAACTAAGGAACGTGTTCAGTCAA
ACCCCCGTGGGGGTCAGTGGGCTGGGCCCAGGGAGGCACCTGGAGACTGTGGGGGAGGAAGGCCCCAGGCCAGGTGTTAACACTTGTAACAGGCAGG
AATTACAGCTGGCTGGGGCTAGGGCTGGTGAGCCGAGCTGGCTGGAGGCTGTTGATCCCACAGACAGTCAGTCAGTCAGACAGACAGACAGACAGAC
AGACAGACAGATGGGAGATACCAGATCGGATGGCCAAGCTTTAGCAGGGTGGTCGCTCTTCCAGAGAAGATCTTGCCGTGGGGGAATTCGTCTGGGG
GGAAAAAAGAATGATGGGCCCCTTGAAAATGAGTTCACAGCCCACCCCTATTGTGGGCGGGGCCTTGTGCTACAAAGGGATCGCAATTTGGTGGTTG
GTGGTAGAAGGTTGGTATCCTTCTAATGGCATCACACATTGCCACACAAACAACAAACAAGACAACTGGTGAAACACCAGCTAGTATCAGGAACTGT
GTGTGTCCTTTAGAAAAGCGGACTGGACTTTATAGGGAAGAAGGCACGTGGTTGGGGTTGGGATAGTGGTTGAGGGGGGACACAGCTGTCAGAGGAA
AGTCCTCCCCTGCCCCCTCCCCCCTTACAATCTCCAAGTGTCTTATTAACAGCTTTGGGACCAAGAGGTAAAAGCTGGGTGTGGCCCACTTCTTAAC
ATAGATTCTGAGGTCTTGGAGTTTTGGATGTCTAAACTGCATTGAATCCTGGTGTCAGAAGAGGTGACCTGGGAGCCTAGGCCTTCACAAAGCTGGT
ACCTGCTGCTGCTACCCCACTGTAAACTCAGCTAGAGCTCTCTAGGGCCCACGCTCACTCACTTCTGGGCCTCTGCTCCAACCTCCATTAAAGAGTC
AAAACGAGGGCCCCAGGTAAGAGTCCCCAAGGGACAGACTGGTCCAAGGAAGATTTCCCCACCCTCTCAGGGCAGAACTCACTGCTCACAGGAGGAC
ACAGTTGCCTGGAAGGTTAGAGCAGTATTCATGGGCCTCCTACCAAAACCGCGAAGAGAAGGCCATACCCTACATTTACCCAGCATCCCCCTGTTTT
GTTTTGTTTTGTTTTGTTTTGTTTTGTTTTGTTTTGTTTTGTTGAGATAGGATTTCTTCATGTAGCCTTGGCTGTCCTAGAACTTATTCTGTAGACC
TGACTGGCCTTGAACTCAGAGATCCTTCTTCCTGCTTCTGCCTCCTGGGTGCCGGGATCAAAGGCACCTGGCCAGCACCCTTCTTGAAGGCTCGGCC
ACCACATGTTCTGTTTCTATATATTCCCTCTGGGGAGAAATGTTTCAGCCTGGAAGTGGAGAGCCACGTCTGAGTTCTGAGCTTACCATCCATTGGC
TGTGTGACCTAGGGTGACTCTGTCCTTCTTCAGCTCCCTGCCTCTCTCTTGACTATACTGAGAGGTGTCCATTCATCTTCTTAGAGCCTCGGGGATA
TGATGGGGACTCCACAGCAGATACTTGGGACCTGCCTGAATCAGCACACCCCTTGATTTCTGTGGCTTGGTGTACCTGCCCTAAGCCCCACTTTCCA
CCCAACACTGCCATGCCTTCTTAATTCACTTCCAAACCTCACGTAAGGGCTCTCTATTCCTCTGTCTCTGGGCTGCTGGCAAAGTGACCTCTCCCCG
TCTCAGTTTCCCCATAGGAAAAATAAAGTTATGGCCGCTACCCCATGAACATCAGTGATCAAATTCAGGCCCCAGAATGCTGCCGGAATGCAGGAAG
TACAGTTCAATGTTTGAACCTCGGTCTGGCCCTGAATCCAGACTTGTCTCTTCAAATAAACCCTCCGAGATTGGCCCCCATGGCTCTCATTTCTTCT
TGTTCCATGTGCTTGGCACTGGTGCCCACAGGCTTGTAACTTCCTTCAAAATCAGAAGTTCAGCTTTTTAAAATATTTTTTATTATATTCATGTTAG
TGGTTTCCTACATGTATGCCTATGCAAGAGAGTCGGATCCCCTGGAATTAAAATTATAGACAGTTGTGAGCTGCCATGTGGGTGCTGGGAATTGAAC
CCTGAACCTCTGAAAGGACCAGTGCTCTTCACCACTGAGCCATCTCTCCAGCCCCTTGAAGTTCAGCTTTTTTTTTTTTTTTTTTTTTTTTTTGCTG
CCTAGGGGAGGTAGGGTAAGGTGGACAGAGGTGGTCTGGGGTCTCCCCTAATCCTCCTGATACCCCACAGTCTTCTGAGCTCGGAAACCTCTGTCCT
CTCCAGCTGGAACACAGAGCTCCCGGGCCTGGTGGGGAGGGGTAGGCTTGGGGCCCTGGCTGCTGGAGCAGCCCCAGCACGAGGTGAAGTTGCTTCT
GGAGCTGGGGGATGACTCAGAGGGTGATTTATAGACGGAAAGCAGAAAGCTTGGCTCCTGGCAGAAGCCTGCTGCTTAATTACATTCTTTGGGGGGT
GGAGGTATGTGGGGCGACAGCAAGGGAGAGACTTCTACCTCGTCCCCTCCGGGCCTGGTACCTGTGATGTCCTAGCACCAAATAGGGTTCTTCTTAG
AGAGTGCGTCCCCTGTACTGAATGCACGGTTAGCCACTGAGAAGAGGAAGAAGTGGGACAGAATCATCGGAAGGACAGAGTCCCGTGGGGACCACCC
CAGGGACAGGCTGATGGGGCACACAGGAAGAGTGGGATGCTGAGAAGGATCGCTGAACCTCCACCCTGCTTCTGCCGAAGAATCCCTAAGCCACCTG
GGCCTCTGGGTAGCCACTCTCCACTTCCCCTTCGCGTGGTTGCCTGTGAAGACCTTCAAGTTGGCTTCTTGTCCTGTGGCTTGGGTCCTGGTAGCCC
ATGCGTGCAGGAGACCAGGCCTGGAACTCAGAGACTAAACTCTGCGTCTTTGGGTTAGATGACCTGTTGCGTGGAAGTGTGATGACTGCTGCAAAAC
TGCAGCGGTTCTGGTAGCATCAGCCTCGTGCTGGAGGGAAGGAACCCCACTAACCCTGCCTTTAAACTAACTACAGCTAGCCTGTCTGCCCATGCTG
ACCAGTGTAGTGACTCCAACACAGCCCCAGATACTGAATTTCTGGGTCAGGGGTCCCAAAAGGTATAGGACAGGCAGGGGTAAGGAGGCCAAGGTCT
GCAGCACCTGGCTGCCTGTTTGAGCTTGGTTAGTACAGCTGGCAGGACTTGGCAGGGGTCAGGATGGGGACAGCAGACAGCTCTCCAGTTCCCCCTG
AGGCAGGCCTTCTCAAAATGGCCTCATTAATGCATGTGGAGTGAATTCCAGAAATGTCAGGTATACTCACACATCTAAAGAAGGATGGGGACCCAGA
AATGTTCTGTGCTTGGAGACAAGAGGAGTCAGAGTGAGGGATGGTTTCCAGGTCCGGGATCTGAACTGTTGGACATGGTCTTCCTATTGCAAAGTGA
TGCTCTGTGCTCAGGACAGTGGATGTTTGAGTTTTCTGTGCCTAGTGGGAGACTGGAACTGATTCCGGGACAGAGTAGAGACCATAAACTTTATATG
TGAGCAGCTTTGAGGTGCAAGCTGAATTGCCAACCTTCCCAGACCTCAGTTTTCTCATCCACCAAATGGCCAATAACATGCCTTCCCTGCCCATGGT
ACTAATGAGAGCTCAGGATGTCTGTCTTACCAGAGTCAGCTCAGCAACTACCATTGTTAGAAAGAAGACCAAGATCCCCACCCCCTACCCAGAGGAG
GTGCAAGAGTATCTGTAGTGGATCCCCAATCTCTGAGTAGAATCTCTGGGAGCAGAGCCGTTGCTTGGGTTTAAGACCCAGTGATGGCAGGTGTGCT
CCAGTTTCAGCTCTGGAGGTCCACGAAGAGCACATAGGCCTGATCCCCACTGAGACCCGGTTAGGAGGTCTGGGTGGAGGTGAGGGCAAGGTAGGCA
GCTGGAAGCACTCTCTCAAAGCCCGAGGCCATCAGGAAATCCAAACACCCCCAGGGAATGCCAAGGAAAGGGACAGCGGCATAGCCCTGTTCCCTAA
CTGAGCTAGAGAGACTTGAAGAGAATGTCCTGTGTCCCTGTGTTGGCAAGGGGGATGGGAGCAACAGGACCCTGTGACCAGGTTTGTTGGGAGGGCC
TTTCTGCCAAACCTGCCCCTGGGCGCAGAGTCCCACTTATCTATCGGAGCCAGCCGGGATCAGCAAGGAAAACCAATCTTCCAGAGCCCGCTATGCA
TGCAAATGGGGGCTTGTGACCATGTGAACCTGCACACCGCCTCTCTCTAGTTCCTCCACACTTCATAACGTGGCTTTCCGAGGGTGTCATTCTGTCC
CTCTGAAACCTCTCATGGTTCTGATCTAGACCCCCTTTGTTTTATTTTGGCCTCTACCTGCCTATACAACATGCCTTTCAGAACCCCTCTCCCACTC
CTTCCTCAAACCGAACACAAAATAGTACATGAACCTCTGCATGCCTCCTTCCTCTGACCTGGGGAAGGCAGTAGGACTTGACCCCTAGGTTGACCAG
GGCTTATTTCTGCTCTGCCAAGCACAGGACCTGGCTGGCTTGTGGCATGGAGCTGACAACCCTAAACTGTGAAGGGCCTTTGGTGTCTCTAAGGCAA
TGGGACCCTCCTGAGCAGACTGCCGCAGCCGTGCTGGATACTGGGATGTCTCCACCATGTCCATTCCCTTGGGCTTTGTTGCTCCTCCTCAGCCCAG
ATTGAAGAATTCTATGTATGTGTTAGAGCTTCTTCTATGCTCACCCAGCTCTTGCTATGCATATAAAAGTGTCAGGACCTAGGGACAGGTGCCTTTG
CATGCTGTGTGGCTGTCTTTAGAGACCTAGAAGATATTCTTCCAAGACTAACGGTGAGCAGCTGCTTTGCACAGACCACACGTGGTGGGAGAAGGGT
TGGAGCCCACATTCTGCCTCCAGTCGGGGTCAGGAGAAGACTTCCTAGTTAGAAGGAGGAGAAGCTGCTTGTCNNNNNNNNNNNNNNNNNNNNNNNN
NNNNNNNNNNNNNNNNNNNNNNNNNNNNNNNNNNNNNNNNNNNNNNNNNNNNNNNNNNNNNNNNNNNNNNNNNNNNNNNNNNNNNNNNNNNNNNNNN
NNNNNNNNNNNNNNNNNNNNNNNNNNNNNNNNNNNNNNNNNNNNNNNNNNNNNNNNNNNNNNNNNNNNNNNNNNNNNNNNNNNNNNNNNNNNNNNNN
NNNNNNNNNNNNNNNNNNNNNNNNNNNNNNNNNNNNNNNNNNNNNNNNNNNNNNNNNNNNNNNNNNNNNNNNNNNNNNNNNNNNNNNNNNNNNNNNN
NNNNNNNNNNNNNNNNNNNNNNNNNNNNNNNNNNNNNNNNNNNNNNNNNNNNNNNNNNNNNNNNNNNNNNNNNNNNNNNNNNNNNNNNNNNNNNNNN
NNNNNNNNNNNNNNNNNNNNNNNNNNNNNNNNNNNNNNNNNNNNNNNNNNNNNNNNNNNNNNNNNNNNNNNNNNNNNNNNNNNNNNNNNNNNNNNNN
NNNNNNNNNNNNNTGTGTGTGTGTGTGTGTGTTGGGGAGAAGCTATGTATGCATTTGTGGGAAGGGGGTAGCTTATTCATGTGTGCATTTGAGCATG
GAGCCAGAATACAACCTATGGTTTCATATCTTGGGCACTCTGTTTAGCTTTGGAAACATAGTCTCTCACTGAGACATTAGGTTCCCTGATTCGTCTA
GGTTGGTTGGCTAGTGAGCCTCAAGGATTTCCCTGCTTCTGCCTCCCTAGCTTTGGGATTACAGGCACACCACCACACCCAACCTTTTCCCATGGGT
TCTGAGGAATGAGCTCAGCAATTAGATAAGCCATCTTCCCTCCCTAGCCTCAGAATTCATGCCCATAGCCTAGCCCTGAGTTGGTGTTTCTGGGCTG
TTGAGTCTTTCCTTGACTTTCACAGCTAGACATTCAGCACTATTTCCTGCTGAGAAGCCAGAATGCTCTCTCCTTTCTTATAAAGCATATTTCCTTT
ATGCATCAGCCATTTAGGAACCCCAGAGCTAGACTTGATACTCGATGTTTGCACCTGTGCTGACCTTGGGTGACACATTCGTCTTCTCCTTTGCCTG
ATCCAGTGTTTTCATCTCCATTCTGCCATTTATCCAGAAACATTTTGTATTCTAAACTCCTTGCGGGCAGACCCCATGCCTGGAGCATCTAGAGTTC
ACCACGCTTGGTCTCTGTGTAGCGGCTACTGATGCTCCATAAATATGTTTTGGCCGTCAGACAGGACGTTGGCTGCCAGCTGTGCTGAGTTCTTTCT
GAAAAGAGGCAAGGCAGAGGAAAATGAGAACGAAAAATTCATTTTGTCAGCATGGCAGCAGTATGCCTGTGATCCCTGCACTCCAGAGACTGAGGCA
GGAGGATTGCAAGTTTGAAACCAGCTTGGGCTCTACAATGAGAGTCTGTCGACACAAAAGAAAGAAAGAGGGAAAGGGGTGGGTAGGGGAGAAAAAA
ATGGCTGTTTCTGAGAAGCGGCTCTGAGCTGACAGTTTTGAGTTGGGGGAAGCGCATCCTGTATCTTCCCCAGAAACCTTATCTCTAGGGATGCTGT
TTGCAGGACTGACGGTGCTTTAGTCTAAGCTTGAAGGTGTCATCCCACCTCTTGGGAATCTCAAACATTGTAGCCAAGGATGACCTTGACCTTTTCC
TCCTCTTTCACTGCCCCAGTGCTGGGCTTAGCCCGCACCACTGTGCCTGGGTTTATTTGGTGTTAGGGATTGAACCCAGGGCTTCATGCATGCTAGG
CAAGCACTCTACCAACGGAGCTATGCCTCAGGTTGGGGACTTTGTGTCTGCCATGGCTGTGCCTTCTCTTTGTTTGCTCCCCCCACCCCATGCCTGT
CTGTGGTGTTCTCCTTGGGAGATGACTAATTGATGCTCTTGATACCACTTCCTAGGTGACACACAAGTACCCAAGTGCCCCCTTTCCATCTCCCCAG
CAGCTATTGCAGAACTACCACCCTGTAAAAATTCAGGGCGGCATGCGGATGAGAGAGAGAGAACACAGGAGACCACACTCAGGACCACATAGGGTGG
CTGGCCTCTCTCAGGCCAGACGTTCCCATTGGCAAAGCTGTGGGGAAGACCCCAAGTAGACCTGGACTAAGCCACATCACTGCTGTGGCAGGAACCT
CACAAAAAGGAGAGGAGAACACTCAATCGTGCATTGTGGTGCCTTTGACCCCAACACTTGGGAGGCCAAGACAGGTAGATTTCTATACCTTCAAGAT
CAGCCTGGCCTATGCGGGAAGTTTCGGGACAGTCAGGGTGATGAGAGACCCTGTCTCAATAAACAAAAATAGAAGTAGAGAGGAGCTTCAGGGTAGG
GGAGCACAGCCCGCCAACCACCTGGCAAGGCTTCAGTTCACCTCTATGCTCCTGCCCTTAGTTGGCCCTAGACCCATCCCAGTCCCTTGACTTCAGC
CAAAAGAGCATCCAAATCTACTGTAGGTGGACCTCCATAAGGTCCAGAACTTTCCAAGGATGACCATGACTCTGGCATGCCTTTGAAGCTAAAGCTG
CACCCTGTCTCCAGAAAGTGGGCAGCCAGGGAGCAGATTTTAATCATCAGCGAGGAATCCATCTGTCCTTTTTGAGGTTCCTGCCTCAGCCTGGTGT
GCACAGAGGGAACACATCACCTCTGTCAGCCTTAGAAGCATGCTCTTGTTCTCCCCATTCTACAGGTGACAAACTGAGCCCTTGAGAGAACCACTTC
AGGGCCTAAGGCTCCTCAGGCTGTGGACTGAAACTCCAATTAGATGCTGACTGTAGGAAGCCAGGCCCTCCAGGGTTCACAGCCCCTCACTGATAGC
CAGGAAGCTCCCTCAAGGTCTATCTAGACTTAGTCCAAGCCCAGACAATTTCATTTGGTCTCTGGGATGTGAACATCACTGAAGGGTCTCAATCTGC
CCTTGTGATTGGATATGTTGTTCCTGGAGTCCAGGGCAGTCCTTTGGAGGTAACCTGAAAGTGCCATTAGCCCAAGTTATGAGGGGGGTCCTGCCCA
GGTCTTTGGGGCAGAGGGCTCTGCACCACTGTCTGACAATTGTGCCCCTTTCTCTGGGGACAGGAATCTGAAATCCCAGGGCCAACACCCCTAGGGC
CCACACCCACCCTGGTGATGCTCCAGGCATCCCAATATCTGGGGAATCCTTCCCAGATGACTGTAGGCCTCCTGAGCTCTCTGGGTTTCTACCTAAA
GTCTGTTCTATTAGAGAAGATGACAGTACTGATGACCCAAAAAGAGGTCAGGGCAGGGTATTTGCAGGGGCTGTGGGTACCTGGAGGGTTAGCTAGG
TGTCCAGCATGGTGAGCCCTGTAGAGGCTGAGGGCTATTTCTGCCCATGTCACCATTTTCTAGAATGAACTGCCTGGAAAGACTGATTTTGCTTACT
ATTTAAATTTTGTATTAGTAACACACACACATATACACACTTTCTGGAAGCACATGGCAAGACTAAATCAAGAAAGCACATGTGTCCTGTGGAAGTC
CAGGACAAGGATCTCAGTTTGAATGAAGAGTATTGACATTTGTTAACCTGAGGTGAGGCAGTTACGTCTCTGGTACCTGACAAACACTCAGCCTTCA
TTTAATAATCTCGTCCCACACACTCTAGCCAGGATGAAGGAGTTGGATGGGGAAATGGGTCTGTCTAGGTTCTCCCAGCACAGAAATCTCGGAGAAG
GCTTGACCATCTTGGTGTCCCCCGCCCCCAGCCCCCTCCAGCCTTGCAACATGGGCTCACCCTAGCAGGAGAGGAGCCCCTTGTTTAGCAGCAGTAC
CAGGGACTGTCCCAGCTGTGTTCCTCTCACCTTCAGGGCCCTCTTTGCTTCAGGGCCTCATCTTGCCACTCTCGGTCTCAGAGGACCTTCCCTGTGC
TTGTGGCTTTAGATGATGTGACCAGAAGGGCAGCGACTGCATCAAGGAACACACCCACCTGACTGTAGTGTTCTTTAACCCCAAGGCCGACCTTGAC
CCTGCACCACCCTGCACCTTCCAGCCCCAGCCTGGCTCTCCTCCTGGCTACTCTCATCTCTAGGATGACAGTCCCGGGCTTCCATCTATGTAGCTGG
GTGACCTTACTTTCTCTGAGCCTCAACTTTTCCCTCTGTAAAATGGGGATGGCAAGGATTAAAGGATGTAACATTATATGAGACAGACAAGGTCTGG
CGTCTACACAGTGAGTAATGCTCCCATTTGCCATCATTAATCTCGCTGTCTATTTTGTTGTTCTCGCCATGCATCACCGCTCTGCGCTTTTGTGCTC
GCCCCTGCCTTCTTCTGGGGAGGTTCCGAGGACTCCTGTCCGCTCTGTGAAGTGAGGTTGGTACCATTGTCTCACCAGCACCTGCTCCACCTGAGCT
CCTCCCGGGGTCTCAGTGGGACTCCTTCAACTCTACCCACCTTGCCAGGCAGCACGGGACACCACGCAGCATCTGGGGACAGGTCTTAAGCTGAGGG
GCACTGCTGTGTGTGCCCTGCTTGGCAGAGGCCCAGTCTTCCTGCTCCAGGTGTCTTCCTCCTCCCAATGTCCTCCTCCTCCTCCTCCTCAGGAAGA
CTGACTGACACTTGTCATCTTTCTTGACTTCTCAGTCACATCTCATTGGTATCTATCTTATCCTTCCAAAGAGGGGACCAGCTCTTGAGGACATGAA
TTCTGCTGTGTGTCTTGGTGACCCAACTGAGCTTCATATAGCAACTCTGGGGTGCAGAGCACAGCTTGGGGAGCACTGTCGTTCTAGAGATTGTTGA
GCCGGTGACTCAGGACCCCTCCTCAGAAGCTCCGGTGCGGCTTTCGCTGCTTCCCGTGAACTGGATAGCAGCTCCCCCTCACCCATGATCTCAGCAG
GGCCCATCCTTGAGCTTCTAGCCTTTCGTGGACACATAGCTCTCTCGCTGCATTTGAAGAAGAGCTGTCTGTGGAAAATGGCACGTCTCAGACTTGT
TGGCTGGTGGCTCTCAGACTTTCAGAGCCTCCATTTCTTCTATGTAAAACGGCGGCGGGGGTGCCGTGTTGTCAGGAAAAGTTGTGAGGTCCTGCTA
CATAGGGGCTGGGCTGACAGGGACTGATCATGGGTGGTATGCAGGTCATTCCAGTCCAGCGAGGGTTGTCCAGGGACTCAGTACCGGGAAAGAATGC
AGGTCATCCTGCCCTAGAGAAAGGGCCACGCTTGGGGAAAGCTATACGCCTTGTGATGGTGTGCCCCAATTATCACCTTATTTGAAAACCAAAATGG
GAGTGGCTCAGAGCAGGATGCAAGTGATTCAGTGAGGACCCTGGTCTGACCCTGTGTCCTGGTGTCCTGCTCAGCTCCTGGGAAGAGGTAGGCAAGT
CAGATGTGGTGGCTTCAGGGAGTTTTACTGGGGCTCCTGGGCTGGCCTGTGCAGGTTTAATATGGCTGAGGCATCGGTCATTTCATCCCTGAGAAGG
GTGGTGAGTAAGCCTTGCCTGGGAGGCTGGGGCCGCTGTACACATCTGTCTTTAAGGGAAGAGGGCCCTGCTGTGCTGCTTAAAGTGTCACAGACAA
GAATGGGTGGCCTGTGTGTGACTGATATGCATCCTACACAGACACCAGCTGTTCTGCTGAGAATTGGAGAATGAATATGCTTTTTATTATATAGTAC
TTTATGCACACAAAGCAAACACATCATCTATGGGATGTCATAACAAGATGAAACCTTGTGCTTCCCCACACCCGGAAGAACCAGAACATCAGCATCT
GTCCTTAGGCTTCTCCCTCCCCACCCCATCACCATCTCCTTCCACATGTGACCACATCCTGATTTTCGCCATTTTATAAAGAGAGATGGTGGAGGGG
GTGGGGGGAATGTCTCTCACCCAGTCTGGAACTCACTAATTAGGCTAGACTATCCAGAAAGTCCCTAAAGATTCTCCTGTTGACCCTTCCCCAGTGC
GCACAGGGATTCCATGACTGAGATAAAAAGCCGGCTGGATGTATGGGCCCACACCTTTAATCCCAGCACTGCAGAGGCAGAGGCAGGTGGACCTCTG
AGTTGGAGTTCCAGGACAGCCAGGGTTACACAGAGAAACACTGTCTCAAACAAACAAACAAACAAACAAACAAACAATAACAAAAGATAAAATGTAA
CCTGAGATAAGAATGCCCACAATACATTTTTCACTTTGCTTGTTAAAAAAAAAAAAGAGAGAGAGATAGTTTGTGTGTGGTCTTCTGTGGTTTCCTC
TTCTTTGTCTTATTTTCGAGATGGGGGGGGGGGGGTCTTATGATATAGACTTAGCTGGTCTGGAATTTACTATGTAGACCAGGCTGGCCTCGAGCTC
ACAGAGGTCTCTGCCTGCCAAGAGCTGGGATTAAAGGTGTGTGCCACCACATCTGTCTTTGTTCTTTCTATTTTTTGTTTCTAAGTTCCTCATTGTT
CCTGAGTCTTTCTATATTTCCTTCATTTTCCCCACTGTAGAGTAGTCACTGTGTCTGCTTCCTTCTTTTTGTGTACACAGGAGTCTCTCTGTGCCCA
TGGAGGAAAGCTCTCCCTCCATACACTTGCCTTGGAGTGGAGCAGTAGGTCCTGGCTGTTGAATGTTCTTAGAGTGATGCCTAGCCATTCCCAAACA
TGCTCCTATCTCCTTCCTCTCTTTCCTCTCTTTCCTCTCTTCCCTCTCTTTGCCCATGATCTTCCAAAGCTTTTTCAAACTCAGAGCCCCCGTTGTC
CCAGGTCTCTTTCCAGCTTGGCTTCTGCCTCGCCCCCACACTGCACATCCTCCAGCTCTTCGGAGCATCATTTGGATGGAGCACTAGGTCTCAAAGT
GTGTCTCATCACACTGGTCTTATGTGATCCTGCTGGGAAAGGCTTCTAGGGACAAGTAAATTTAGAAGTTAGCCTTGCTTGTTGGAATCTCAATGCC
ACCAGGTACACCACAGAGGTGACCCTTGCTTTCATTTGTCTAGTCTTTCCCCAAAATAGCTAGCCCAGGAAATCCTCCTGCCCCTTTCAAAATTCAG
TTTGGTTTTTATGGTCTTTATTTTCCCAACTGGGAGGCTGCGATTTTTTGCAATGTATATTTTTTTTAACATTCTGCATGAATTGAGGAAGTTTAGT
CTAGTATCTCCATCGCTTGGGGGTCTCGAGATGATGAATGAAAAAGCATAAGTGGTGAATGAAGGCAGCAGTTAGAGAAGCAGTTGGCTCGTTGCTC
TGTGGTCCAGCTGGGTCTCTTGTCCTGAGGAGTCAGAAGCTATGGACAACTTGAGGTTGTTTGGCCCGTGTCCAACCCTGCCTACAGTGTTTCTACC
CAGCCTTCCTCCAACACCCACGTGGAATGAGTCACTCCCATTAAGCCTCCTGTCACTGGTTTGGGGGCATCTGTTTCATAGGGAGGCCTGAAACCCT
TGCAAGGGCAGAGGCTCTGTTCCATTTGCCCCCTAGGTTCTCAAGAGTGGCTGCTTACCCTCTGGCTGGTGGATGAGTGCAGTCGGAGGAGGTCTCC
TGTGTATCCTTGCCAGGGACTAGAGGGTACTATGACAGTCTGCAGGCTCTGGAGTCAGACCAGATGAGCCCTCATAGACCTGCCAGTCTCCACGCCT
CAGCTTGGGAACTGGGCATCTTCTCTTCTTTCCACCCACAATTACTCTACTGACTCTGGGAACAGGGTCTCACTTTGTAGCTCTGGCTGGCCTGAAA
CTCATTATGTAGACCAGGCTAGCCCCAACAATTATGACAACCTCCCGCCTCTGCCTCCCAAGTGTAGTCATGTTCCACTGCCCTGGCTCTTTGTTTG
GTGGAGTTCTGTTTGTTTAAATTGAGACAAGGTCTCATGGAGCGTGGGCTAGCCTGGGACTCACTATACCGTGGAGGATAAACTCTGATCTTCCTAC
CTCTCTCTACAAGTTCTGGGATTAAGGGAGCACACTTAGTTAATGTGATGGTAGAGACAGAACTCAGGGTTTTGTGTGCATGAGGCATGAATTGAGC
TACAGCCCCAGACTGTTTGTCTGTTTTGAGACAGGGTCTCATATGTAGCTCTGGTTGCTTGCCAAGTAAATAAGACTTGCCTTGAACTTGTGGTGAC
TCCCCTGCTGCAGCATCCCAGATACTGGGATGTGCAGGTGTGCACCACCATGTGTGACATTGCTGGGTTTTATTTTGATCCTTTGTTCATCCCTACA
AACTAGAACCCATAACAGTGCTTGGTTGTTTTGGGGTTGGGAATGGAGGGAGCGAACCTACAGGTAGGAACTTGGGAAGCCCAAGGGTAGCCAGGAC
TTTCATGGCTGACCCAGGAAGCTCAGTATCCTGAGACCAAGATCTCTTTGACACAGCGTGGCTAGAGCGTCCTGTGCTGTAGCAGTGTCCTAGAATG
GAGGGCTCACAGGGCGTGGCTTACTGCCGTGGTCCTCAGCCTCCTGCACAGGATGGTGTGCGCTGGGAGATGCTTGCACACAGAACATTTGAATCAC
TTTTCCCTGGGCTTAGAGCGCCAGGAGGTCAGATAGCAGGGCCTGAGGATGCTAGAGGCCCACTTACCATTCTCAGGCATACACCACTTGGCCTTGA
AGTCGGGGAAGCTCCTCAGACCTCATTAACCTCCTATTGTAAGGAGCCTCACCAGCTCCAGAGCACCTGCTCTCTTCTCTTCGCACTGGTCAGCCTT
AGTTCTAGATCTGTCTTCCCTGGCCTCCCAACAGAAGAGATAGATCGTGGGGCACTGCAGACAGGCTGAGGTGAACGTCTGATGTGACACACGGATG
CCTGGGGACGTTCACTGGGGAGCAGAGAAACCTGGGCATTTATTTCATCCCAGGTAACGAGCTGTAGTCCCCTCCACAAGGGAGAACAGAGCAGGGG
TGGTTCAGAGGGGTGGAGGCACGTAGGTGAGATTGCCAATTGGGTGTCCAAGAGGCAAAGATGTCATTGAAATGACAGAGCCAGAGAATCTAGTAGA
GGGAGACTGAGATCTTTGCGGCAGAGGAAGGAAGACATTCAAAGCAATTCACAGACCACTGGTCTTCTGAGAGCTCGGGTAGTGTGAGAGGGGAAGG
GGAGATGGAGGTGGTGGTAGGCTTTATCCTTTCTGCAGCGGTACAAGCTAGAACGCGTGGTAACAGGGTGGTATGAATTTCCCCAGAGGTGTGGAAG
GCTCCTGATTGGTCTGATTCCTCAGCCTCCTCGTGAGACACTCCATCAGGTTGGACCTGAAAGTACTCAGATCCCTGCCAACCGCCATCTTTCAGAC
TCACAGACAGTCTCCACATTGCTGCCTGAGGGATCTGAACTCAGTAGCTGACTGTCACCCCTGTCTCTGTCCACCTTGACCCTGTGTGTTGGTGTCC
TACTTACATCCCTATGTCCAAGGCTCCTTCCTTTTGAGAGCAGAGAAATGTACACAGAGCATCCCCTTTTACCTCCTTCCTTCTTGGTCCAGGTCCC
ACCCACTGGGAATACCCTGGATATACCTCTTTTGCCCCCAGTGTGTGTAATACATCAAGGGTTACACTCGGTTGGAAGGAAAAAATGATTTTAAAGC
AATAACAGCAACAACAATGCCAAGTGTGGTGGTATCTACCTGTCATCCCAGCATCTCGGAAACTAAGGCAGGGTAATTTCCATAAATTAGCATAGCC
TGGTCTGCATAGTGAGTTCCAGGCCAGCCAGAGCTACACAGTGAGAACCTATCTTAAGGTAATATAATTTAATATAATATACCACTCCCCTATGTGT
TTTGCAACCCATCCTGCCATGTGGCCCCTTTCTGTGGGTTTTCTCAGCTCTGCTTGGAAGTTGCCTGTGTCCTTGCTATTGTCCTTTAGTCCCTGTG
TGCATAGCCCTGTTATTAGATTATACAGTCCTCCGGGTGAGGGGCCATGACAGCGTTGAGTTAGTGTGGGACACATTTTGGGTGCAGAATAAGTGAA
TTCTGCCAGAATGAGTCATTAGCGGAGAGTGGATGGAGGCCGTTAGACACAATGGCAGCAGCATAGGAGGCGAGATGAAGCCATTCAGACCCCTGTA
CCTTCTGAGTCTGCCTTCTCGTTGGTGCAGTGCATTAGCCTGAACCCCTTGGAGCTTTTGAAAGAATAAATCTCAATGAGCAGGTTCTGGAAAACAG
CTTTGCAGTCTCAAAGGTGGCCAGCTCCCCTGAGAAGCCCACATCCACACTGGTTCCGAGAACCCTCACCTTCTGGGCTTGCTATCTTGGAAGAGGC
CCAGTCACCTAGAATTCTCTGTGGTTATTTGAACCCATGTGTCAACCCTTCTGATTCTGGGACAGAGCTCTTTTGTCTCTTGAGGATGCCTGGGACA
TGGCCCTGCTTTGATACAGAGACATAAACATCAAGGGTAGGAAATCCACATCAACATTCAAGAGAGAAAATACCAGTAAGAAGGAAGGCTCCAGTGT
GAGTCCAGCACTCAGCCTGAACAACAAGACAGGCTGGGTGTCTCAGCTCTCCACTGACACACTGTAGAGTCTCCCACCCCAAGAAGTCCCTTCTTGC
TTTCTTAGCAGCCTCAGTATCTCCATCACCAGCTGTATGATCCCAAACATATTACCCGGCCTCTAGAACCTGTGTCATCACCTGTCAAGTGGAGATA
ATAATGTCGTTGGGTTCCTTGGCAAATTAAAGGATGTATTTCATGTAACGTGCTTTATATGATACCGGGCACAGAGTCAGGGCTCAATAAATGCTGG
CCTTCACAAATAATAACCATTGTGAGTGCCCTGGAGATGGTTTCACCCCCTCCACTCCCTTACACCAGAGAACAGGAAATCATTTCCTCACGGCCTT
CTTAACAACTGTCTCCCCAAATAAGTGCACCCTATATTATCTTATTCACCCTGAGTGTGCACCTGTAAAGCGGCCCCTTTATTCCATTTATAGCTGT
TTCCACAAAGAGGCCCCCATTACCTCATCTCCCTCTGTTTTGTGGGCTCCTCCTGTCTGTGGCCACTCAGGGCCAGTGTGGGTTCTGAGGGAGCCTT
GGCCACAGGTCTGTGTTGGCATCTGCCCTCACGCGCACACACACACCTTTGTAGAAAAGTCTATAATTTCTTCAAGCTTTGTGGCACATGCCTGTAT
ATCTGTCAATTCAAAAGACTGAGACAAAAGGATAGAAAGTTTAAAATGAACTATATGTCTTTAATCCCATCACTGAAGAGGCAGAGGCAGGTGGATT
TCTGTGAATTCAAGGCCAGCCTGGTCTATATTGTAAGTTTTAGATCAGCCCCGACTACATACATTCTCACCAAAGGGGGTAAGAAAATGAAAGCTCA
GAGTGGGTCGGAGAGCTTAGTAGGACTATCTATCTCTATCTCTATATCCATATCTATATAATTGGAAAGGGCTGAGGAGGAATAGCCTTGCAGTTCA
GTACTTGCCTAGCAGTGTGAAGTCTTGGGTTTAATCTCCAGTACTGAAAGAAAAAAAAAATCTATTGGAATTTCTTTATTTAAATGTGTGTGTGTGT
GTGTGTGTGTGTGTGTGTGTGTGTGTGTGTGTGTGTATGAGAGAGAGAGAGAGAGAGAGAGAGAGAGAGAGAGAGAGAGAGAGAGACTTTTGTATAC
AAAGCTTGTTCTTCTCCAGAAGAAATACAACAAGACATCAGACTATAGAAGCAGAAATGCCTGAGGTATCAGCTGGGCCCTGCAGCCTCCTGGGGTG
ACAAGATTGGGCACAGTGAGAGGACATGGGTGAACAGGGAGGGCTCAGCCTGCAGAATGTATCCTTTCCCCGCTGGGTTATGCACAGGAACTCAGAA
AGATGTGGGTCCCTGTAAGAGGCACATCTGGAGACCTTGAACCCAAAACTTCTGTGGACAGCCAGCATGTCTGGGAGCTCCTGTACTCACCAACATG
TAAACCCCACAGCAAGACTCAGCAATCTGGGTGTAGAAATTAGGAGAAGGGAAAACTCTCGGAGGAAGAGAGATGCAAGGAGGAATGTGGGCAAGGG
GGTGGGGTCCCCCAACAGTGCCAAAGACAAGGTTTCTTTTGAAAGTTTTTTCATGGTGACCTTCCTTTTCGAATGGATGTTAGTTAGCGAGCGGTTA
GCAGTGAGGCTCTTAAACTCCAAGCTTGGAGCCGCCTGTGATTTATACCTGGCCTATGTAGATGAGGGACATGCCCAAACACTTTTCGCTCATACTG
CTGATCAAAAACAGTTTGGCTGCTGCGGCTGTCAAGATGGAGGCTTGAGAAACCTGGAGAGCTAGAATGAGGAAAACACCAGGCTTGGGAAGAAAGG
AGGCTGATTCTGGGTACCAGGATGTACGGCGTAGGGCGGAGCAGATAGGGCCCAGCGCTGGAGCCCCATGAGCGGTCCTAGTCTCCTTTGGCTCTTG
GCTTGCTCCTTGAAATGAAGCGAAGACCCACTGAGCACCCAGACTTCTCCATCCTATGGTGCAGACATCAGACTGTGAATTCTGTGTGTAGCCAGCA
TTGAGGCTGAGCTGCCCTTCTCTGAGTGCTAGAATACCTAGCGGGAGTCCCGCTAGCAGCTAGGAGTGTGGAGTGGGCACTCACAAACCCAGAGAAG
AAAGGCTAGGCTTGGTGGAGAAACTGGAAGCAGGAGCCCAAGACTGGTGGATGTGACCGTGTGGGTGCGGGGCAGGGGGTGCGCAGGAAGGTGTTGA
GGCTCGCTCCCGGGAATGGGCCCGGGAGGGAGGAGCAGGCAGCGCTTTGAACTTGCGCTCAGCCTCCAGAAGGAGGGCGGGGGAAGTCCAGGTGCCG
GCCGGGCTGCTTTCACCTGCGGATCCTTGGCGCTTTGGGGGACGAGGCGCAAGGAAGACCTCCTGGGAATGCAGTGGAAATACCCACCTTGAAAGGC
AAGGAGCGGGAACATAGCCCTGAGCGCCGGGTGTGGCGCTGCTCCCGCCCCCATCCCTACCCGCCTCACGCTGCAGCGCGCACCTGCTGCTGGTGCT
GGTACTGGTGCCAGTGCCCATTCCAGGGCCTCCCCGACCTGTTGGTGCTCCCAGCATCTGAGCCATCAAGGTTCCTGCCCACAGGTTTCATCTAGAA
GTCCCCACAAATGAGTTGGGAGTTTTCTATTGTTCTTCAAACTTTTATTATGGCAATCATTAATGAAGGCTGTGGATCTTGCTTGGAGATTTAGGGC
TGGCAGAGCATGCTACAAGGGCCTGATGTTCGTTCATCATCACAAAGCAGCCGGGGAAATGAACTAGGAAAGTCGAAAGGGGGGCAGGAGATGTCGC
TCAGTTGGTGGAGTGCTTACCTCAGCATACCTGAGGCCATGGTTTTGATAAACCCCATCCTACTTGGATGGGGAGTCAGAAAGGTTATAGCTAGTCC
TGGGTCAGTCAGCTTATTCTACATAGCAAGTTCCAGGCCAGCCAGAGCTACATAACGAAAAGTAGAGGAAAATAATATAAGGAGCAAGAGTTTACAC
ACCTTATAGTGCCACCATTTAAAAATGTTTTAAACGTGCACGTTTGTGTCAAACAATTACAAAGAAAATTCTATTCCGCATGAGCGCTGAGATTCCG
ATATGTAAGGCTGCCCCCACCCCATCAAACCGCCATGCTGGTTAACAAGACGTCTAAGAATTCCCGATGATTCAGGTTGCCTAGGTGTCCTCCTCTC
TGCCTTTACCCAAAGGGTTTTCAACGCAGGCTCCACTCATTTCTTTTCCCTTGTCTTCATTTTAATCTCAAAGTAATTCATTCTCCTTATGCCCAAT
ACACTGGCTCTTCAGAGAGCTATGGTTTGCAGTCTTTGATCATGTGACCTGTTCTCAGATCATCTGCCTGCTTCTTTAGAGTCATATGACTTGTGCT
TCTGTCTCTCGTCTTCCTGACAACTGAGGGTTACTTAGGCGAACCGTCTTTGGCTGGTGAGCTTTATGGAGGAGGTTGGGTACCCCACATTGCGCCA
TCTCCAGCCATCCAGCTCTCCTGCTTCTTTGGAGGTGTTTAATAGGGTTTCTGAGTCTCTTTCCCAGATGGGCTGGTCCAGCGGGTTAGGACTGGAG
TCCATGTGTCTGGGTTTTGCAAATCTGCCCCTTTGCTGGCTGTTTAAGTGTCTCACCTGCCTTCCTGGCCTCAGCAGTCAGCTGGGCAGTGCTCATC
CTGGGCCCTCCAAAGGGCATGGGGAGGGAGGTGTGGGAAAAGGTGAGTTCTCATGGCTCTGGCTCAGCAGATCTGAATGTCTGGATCTGGGAGTTGG
TAGTTCTTATAGATTATAACCACGCCTATAAACATCTGTATGCTCTCAACATCTAGCACACAGCTGGCCCAGTGTAATTGTCCCTGAAATGAAGATC
TCCACCAGGCTGGTGGCCCTCAATGAGCCCCTAGAAAGATGGTTTCTGGTGTGAGCTTCCAGCCAATAAATAGCTCAGCTTTCTGCATTTGAAGACT
CAGAGAAAGACTTCCCCAGGGTGTGCAGCAGTTGTGAGAAAAGTCCAGAGAGCCAGCAGGGTGTCTTCTGCTCTCAGCTTGTCATGGCAGTAGCCTG
AGTGGSGAGGAAAGACTGGGGAGGTCAGTGGGAGCCTCTGGGTCCAGTCCAAGGGGGTCCTGGGCCCATTAGAAAAGCAGACTCTCCACTTAAGTAG
TCACCGGTGAGGGAGGGAAGTTGTCCTCTGAAAAACCTCAACTTTTAGTGGAGAGAACGGCTCTGTAGACAGCTCAGTAGAGAATGTTCAAGATCTA
TCTTCTTCTGACAAGCTGAAGAGATGACCAGGAGGAACAGTTTCAATCCAGAGGGGATTTTTCTAACCTCAGATCTTGAGGGGTGACTAGGAGCTCA
CCGTGAGATGAATGGCCAGGGAAGCTGTTTTGTCTTTCACCAGAACTTGGCTTGAAGGGAAAGCTCTATGAGAACTGGGAATGGTTCTGACCTAGGA
ACCAGCTGTCTGCTTTCCCAGAACCATTAGCCAGGCCCTGCCAAGCCCTCACTTCACTGCACGTGGGAGACTGCCCTGCCGGAGAGGGTCAGCAGGG
AGGAAGTGGTACGCCGCTCAAAGGAACCAATGAAGCACACTGGGCTTAAGGAACGTTTATAGTTCTGATTGGCAGGTCAGTAGGCAAAGAAATAAAT
GGCAGAGCCCGGAGAGAAAAGGATGTGACCTAATCAAGCTGAGCTTGAATTTCAAGCCGAAAGCACAGGCCAGCCAGCTCTCAGCCTCTCTCCCCTA
GGCACTCCTGGCTTTTAGAATTCCTACCCCAAACGGGACTCCTCACACTTGGTCAACTACAGATTGCCTCTTCTGCGTAGAATGGGAGGCCCCATCC
AATGTATACAGAGCAGGAGCTGTGCTGGTAACAGAAGGCGTTCCAGTGTGCTGACGGAGGCTCGGTGAGGCACAGAGGAGTTCTGTGAGGTACGAGG
AGATGGGGCTCTGGCTCGAGGTTCAAAGGCCTGGACCATCCTCCTTTCACCTTCAACCAGTGAAGGACATTGGATGAGTTACATCACTTAAGGGGTG
TGTGTGTGTGTGTGTGTGTGTGTGTTGAGAAAAAGAAGTTAATTGTCCCACCAACCTTTGGCTTTGACATTTTATGACTTGATGCTTTCATGAGTAG
CCTCTCAGGCAGCTGGCTATGGGACCATTTACAGGAGGCTTCGAGTGGCTTTCCAGGGCCTCTTACATTCTGTCTCTCCTCCAGCAAGACATAGGCC
AGCCAGGGACACTTTTCAGGCAGAAACTTCTGCTCAGCAAGCCTTTATTATTGATCAACCTTCACGCAGAAACCCCCGTTCTAACTAACCATCGCTT
CAGGGAGGGTGGACATGCCCCCACTAGAAAAGACTAAATGCAGTCTAGCACAGTCATTTGCAACTGCAAGCAACCCAAGCAGGCCTTTGATCCTTGA
TCATCTTCCCTGTGAAACAGAGCCTGCCTAACTGTGGCCTCTGGGGCCACAAAGGCAAGGATCAGACCTGCTCAGTGGGGGTGGGGAAGGGAAGAAC
ATGGGGACTCACTTGGGTACTGCTTGGTTAGAGGAAATGACTCAGTCCTTGCCCTAACCTCCTGGAAGCCCTGTCTCTGAGACAGCTGGCACTTCTC
AGAGAGACCTTCTTGGGGTCTGACCTGAGAGGCCCCTGACCTGGACCTGCTATCTGGATGTTCTGGGCTGAGTTTGCTTCTGGTAAGTCTTTCTAGA
GAAGGTAGACTAGGCCAGGCTGCAGAAGCCCCTGTCTCCTTCTTTCTTGCCTTCCACTCTTTCCCCTTCCAATTCTCTGGATCTCTCCCTCTCTTCG
TACAGTTAACTAATTCCCTTACATCCTCTTTAGGACCCATCAGCCTGCTTCATGCTCCAACCCCTAATTTAGCCAGGAGGGACAGTCCTTCCTCCGT
TCTCCACTGTGATCAACTCCCCCTTCCTATGAAATGGGGTGGGGGTGGTGGCTCATGCTCAGGACACCTCAAAAAACAGGTTTCAACATTTCACAGG
TTTCAACATTTTTCAGGCGGACTTGTCACACATCTTATCAGATCAGAGCCTTGCAAGCAAGCCCTCTTCGGCACAGAGTAGATGCCGGTACATTCCA
GTCACGCTGGGCTCCCTTTGGTGGAAAGGGTTCACCCAGCTTCTTAGATGGAGGCAGGATTGATACCACTTCCCTCTGATAGGGTCACCCCTAAGAG
TGACCCCCGACTGCATGTTTCTTTCCATATCATCTTCTTCGTCCCATAGATGCCCAGAATCCCGTCTCTTTGGGGTCCCCAGCAAGTGCACTGCTTC
CTATAAAGGTTCCACTGGGCCCTGAAAGGAGCTTCTAGAAGTATCGGGTGAAGATGAGTCTCTGGGGTTACTTCCAGAGTGTAGACAGTCTTTTGGC
CAGCAGAGCCAGTAAAGTTCTGTTGTTTGAGCTCCACCGGGACCTCAGGAAGAGAGGAAGAAGGTCACCCTGCCCTGCTCAATGGCTGCTTCCTTCC
AGAAGTAATGGCTTTGACATTGGATTTCCCTCTTCACGCCTGAGAGTTTTGCCCCATGATGTGGGTTGCCAGCCTGGTATCACCCTTCCTTCATGTT
CTCCAAAAGACTCTGCTTCCCTGCTCCTGCCATGATAATGATAGCCTTGGCGACGTGGCGAAGACAGCCAAAGCCCAGAGGCTCAGAGTTCAGTCTG
AGAAGCACACCCGGAGGCTGGTCCCCAGGCCACAGAGAGCGGCTGTAGCCACTCTCACTGGGTGGGAGGCCACCCTGGGGGCAAACTCCACTCTGTT
TGTCAGAAAGGAGTCTCCACGGGAGGACCTGGCTGTGATGGCAAGAGCTCTCACCTAGGGAGGAAACAGACAAGGAACAGAGCAGAGGGAGAGACAT
TGTGATGGCTGACCGCACGTGCAGGCTGTTTGCCTCTGTAAGTGCTGATGAAACGGGAGCCAGGAACACAGGCTTCAGCCCTAGCCGTGTGAGGTTT
GGGCACACCATGCTGTTCCGGCGTCACTCCTCCCTGCCTGGTATATGATATCAACAGTCCCAACCTGAGATTTCCAGCTAGCTCAGCTTTCCCGGGG
ACCTTTTGGAATCTTCAGGTCTAGAGTGCCTTTCCACTGTACCTCCTGAGCAGCTATCCTCAAGAGGAAATGCCTGCCTTCTGGGTTCCTCTTTGGG
CTCTGCACTTGGCCATGGTCTTCAGCTGTCACTGTCCCCAAGGGTTCCTTTTCCCATTGTTTCTAGCCTCTTACAGATGCCATCTCCATGGTCACCC
TCGTTCAGACCTTCTACATCCCTTCTCTTTGTCCTTATCCACAGCCTTCTCTCTGTTCCCTGAAGCCTTCATCTTGCAATGGCCAGTGGGCCCATCC
ACCGCCATAGCCTGTTAGCCTCTCTGGCTCACCTGAGGCCAGCGACACCAAGGCCTCTGGTGGTATCGATGTGTTGCCAGGTCCTCGAATCTCCTTA
GTGCCAACTGTCACACCAGCCTTCCATCTGTTTCCTAGCTTTTGATCTCTAGTGCTGCCCTTGTCCCATTGTAGGTGGGAGATAGATCAACAAACCA
AAGTCCAGCTCTGGATGCTTCGAGCTCTGCCAGCTTGCCCAGAGTGGTATAAAACCTGGCAGGTGGGGCCCCTTGCCAGCCCCCCTCCTCCTGAATA
GTCCAAGACGTCAGGTGAGCGATAAATGGTAACATGGGTACACCAGCTGTTGTCCCCAGCCTCCTAGTTCGAGGCTGCTCTCTGTTCCAGGTGCTTA
AGTGAGCCCAGCTTTAATCACCAGGTGTGTAGCTGCTCCTGATCACAGCAGTGGGGACTTACTGGCCCCACCCTGGGAGACTCAGTGTTCTTCCCTA
TGCTATGGTAACGATGACTGAGGACATAAGTGACAAGTAGCCAAAGATCATCTCCTGCTCACGTGTGGCATCCACAGTACCCTGATCTGGTAGGTGC
TTGAAGAGGGCTCGTTGGCCTGCCGTTGACAGATGTCTCCTGGCCTGGGTGCTCCTCCGTGGGGCTTCATTCATCTCTGTGTTCCTAGCACCTGGAG
CTCTGCCAGGTTTGGAGTCATCTCTCAGTAAGCGATGTTGAGTGAGCAGTCGCTGAGTGACTGTGTTTACCAAGGAAGGACTTGAGCCCAGCTGCCG
AGACCAAACCCTCCAGTTGCTTATCCTCGCAGGCCCAGACTCAGGCAAACTGGAAACTCAGCCCTGCCCTGGGCTCCACCCTTTTCCCTTCAGCCCC
TGTAATGTGAGCTAAAGTTATCTCTGTTCCCGATGGATCCAGAAAGGCAGATAGATATAAGGGATGGAGAGAGGTCCGAGGACTTCCCATGACTGTG
AAGGGCAGCATCTAGGTTCCCTTTGTGAACTGACAGCCATGGTGTCACTCGGAAACAGCCCCTTCTTGGTCATACGGTGCTGGGAAAGGTGTAGTTA
TGTGCAGAGGGCCCTGTGTGTTCCAGATCAGCATGGATTCTTAGGAAAGGTGGCGGCAGATGCATCATGGGATTTCTCCCTCCTTGCTCTTTATTGA
AGCTTCCTGCCATGGTGCCAGGGCTCACACAGGGCCCGTAGAGACTCTAGAAGCTGAGAGAACCCTGGCCCACCAGACTCAGCTCCTTCCCAGTCCT
GAGCTTTGTCCTCTCCCTTGTAATAATCAGCAGCTCTAATTTCCCTAAGTGGAACGGCGATACTTGGGTTCTTTTTGTCCATTTCTCATGATTTTCT
TCTGGCTTCTAGAAGTTTCCATATTGCCCAGGAGGTAGAGTTCTACTGGACCAAAAGTGGGTTGGGCTTCTGTCTAGCATTGCCTAGAAGTCAGCAG
ACAGAATACCTGGTTCTGTGCCCTTATGGGGTTTTGGGAAACCCTCTACCTTCGTCTCCCTCCCAATGCCTGGGCATTTTATTTCATGAGAGCCTAG
GCTTTTGGATCAGAATCTTGTGGTTATCTCTGAGATCAGGTGGGTGGCTACTTATCACTGTAAGAAAGAGAAGGGCAAAGAATCCGGTGCTCCCAAG
AAGAGTAAGACTCATCCAAACTCATCCCAAGACTAATAGATGAGCCAGAGACCTTCTCCCTGTGCTGTGGCCTGGAAATACACTCTGTCCACTCTGC
CAAGTCCCAGAGAAGCTTCTGAAAATGTGTCTTTATCACACCCTGGGATTCACAGGAAGGGACAGAGAAAGAGCTTGTTGGCATCGAGGCAGGGGTC
GTGGCCATGGCTGCTGACCTTTCCAGGCAACTGAGCTTCCCCGTGACCCTAGCTCAGACCAGTGCCTTTCTGAAAGTTCTCTGAAATTAAGGGATTC
AGAGTTGAAGAGATGGCTCAGCGGTTGGGGACTGACTGCTTTTAAAGAGGACCCAGGTTCAAATCCCAGTACCCACATGGCTCACAGCTGTTTATAA
CTCCAAGACCTGACACTCTCACGTAGACATAGATGCAGGCAAAACACCAATGCACATAAAATAAAGGTAAATAAATAAAAACTTTTATAGAAAAAAA
ATTGAGGGATTCAGGTAGACTCGGTCCTGGTCATTTCAGCTATTACTAATTGTATAAATCAGTGCATTAGGTAAGTTCCAATGTCAGGCAACTACCA
CTATTATTTCTAGAACATTCTCTTCATCCTAAACAGTCATTACTGTGGAGTATGAGCCTACGCCGAGACTGCTGGATCCTGTGGTATATAACAAATT
CTCTTTTTAAATGTTGTATATAGAGGAAAAGGAGGGAGTTTGTGCTTGCATCCGTTTCCAAACAAAAATAGTTCACCATTAAGGCAGCCTGAACTTG
GTGACACCCCCACCAGCATTCACCATCTCCCTAAGCTCTAAGAGCCTGTTGGGAAGCTCAAAACTTAAAAGCAAACAAAACAAGCTAGGCTGGGATA
CAGAGAAGGCTCCCTGGTAGGATGAGCCTGGTGTAAGCAGACAGAGCCAGCCTGATCTCAGCAGGGACTCAGTCATGCAGAGGGATGGCAGAGTCTG
TGGGTCTCTAAGGCTCCAGGACACCTCTTTGTAAGTCCCTGCAGCAGCTAAGCTGCCCTGAGTTCTCTGACTAGAGATGCTGGGGCTAGAGATGCTG
GTAGACTGCCTTCTCAGCAGGCACAAAGGCCTGAGTTTGTTCCCCAGTACTGATTTAAATACCATAAAATCGTGAGAAATGGACAAAAAGAACCCAA
GTATTGCCTTTCCACTTAGGGAAGTTGGTACTAAACTGGATGTGGTGGCCCGTGCCAACAATCCTGGCACTCAGGTAGAGCCAGGAGGCTCAGAAAT
TCAAGATCATCCTTGGCTACGTAGGGAGTTCAAAGCCAGCCTGGGATACATGAAATCCTGTTTCTAAAACAAAAACAAAACAAAAAAAGTCTGTATT
TCATGAAAAGTCTTATATATGTATATATACTTCTACATTTGAATGAAGTACTAACAAGCCACGTATGCATTCTTTCGGAACTGCTGCAGATCTTTTC
TCCATTTTCCTTCTAATTAATTACATCTGTAAGTAAAAAAATATGAATCAACCCATTGGAATGGTTATGTCGAGGTTGGATGAGCACATCTGCAGTC
CTGGTACTCAGGTGTCTGAGACAGGAGGATTGCAAAGCCAAGGCCCGCATGAACCACAGACTATGGCCATGTCTCAGAGCAACAATATCTTGGGCTG
TAGTAGCTCAGCAGTAGAGCCCTTGCCTTAGCATGGGTAAGGTCCCAGGCTCCCTCTGCAGCCAGGAAAACTGTCTGATCTTGTCACCATGCACACC
CACCCACAGCCCTTTGCAGAACAGGTGACAAAGAACTGGGTGTCAGTGGGAAGCTGACAGGGCCATGGGGATGTTTACAGTCTGGCCTAATTGGACA
GTGGCATTGGTCGCTATCATCAGCCTAAGCCTTCCTGACATCTATGGCTCATCCACCTGGCTGCTTGCGTCTGCCTGGGCCTGGATGGTAGGTGGTT
GGGATGAAGACGAGCTGTCCCTGGGGCTGAAGACAACAGAACCTTGGGTAGAGCAGGGCAAGTCGGGGACAGAAGCTGGGTATAAATAGTCCCTGCC
CAGCTGGGCAGGCCTGGCAAGCCCTCCGTCCTCCCCCTCACCAGCTGCCAGTGCCAGCCATGCCCCGACCTCCTTTGGGAGCCTGGTCACCATCTCA
GATCCTCACTGGAGGAAGTCCCTCAGCGGAACTGAGGAGTCTTGTCCTGTGTGTGGGCGAGACCTCCGGCTGCCCGAGTGGGGGCATCAGGCAGGCT
CATGCTGCAAACAAATGAGCCAGCCTTCTGTGGTGAGAAGGGGAGAAGAGGGTACGGGGACACTAGCAAAGGTTACTTCTAGCTTGGGAGCTCACAG
AAGTCTTTAGAAGTGATTCAGGGAAAGTTTGACTTGGGTATGGGCTGCAGAGAGGCACTCAAGGAGAGGGCTCAGCATGCGTGAAGGGTGTGAAGCT
GTTTCAGCTGGCCTCAAGGCAAATCTAATCAAAGCCTCTCACAGTGGGGAGATGGAGAAGATCAGGAGCCTCTCCTGTTGACTCTCCCAGGGGCACA
AGCTCTTCTGTAACGGGGACAAGAAGTGGGTTACACTGATATGTCTGCAGCAATGGAATGTCAGCCATGGTGTGTGGGCACGGCTCAGGGCCGGCAG
GGCATGTCAGGGGGGACAGCTGTCCTGCAGAAGTCAATCCCAAGGCCATAGCCTCAAGGCTGTCCATAGATCTGAGCCCTGTCCCCAGAGGCCCTAG
CTAATTACCACAGGATATCCAGATAGAGCTTGTTGAGACCTCTGACCGGAGCATCCTGGAAACCCTCCCATGCCCCTTGGTCAGTTTGAACATGCAT
CCAAGTCACACATGGCTTTGCTACGCTCAGCCTGTCAGTCACAGAGGGATTTGCTTGGCCAGCCCTGTCAGGACTGCTGGTGAAGAGACTCTGCCGT
GTCTTGGAGCCTTCCTCCTCGTGCTTGATGGGAAGTGGCTTTAGAAATTCTGATGTGCTGTATCAAGTCAGGGAACTGAGGCTCCGGGAAATGAGGT
TGGCGACCCGGCAGGGACCAAGTCCTGAGAGCATGGAACCTGAGGTGGCTGCCATTGCTTGAGGGATCCTGATGTGCATGGCACTGAGCTGTACATG
TTTACTCTTCCCGCAAGCTCTGTCTCACAGTGGAAGAAAGTGTGGTGTGGAGAAGTTAAGGAAATCGCTTGGATTGGCAGCTTGAGGCAGGCAGAGC
CCGATGTGAGCTGGGGTGAAGAGACAGGCTTGGAAGGAGGAGGGAACCTAACTCTGGGTGACAAGTGTCTACACTGAAGCCCTTGCTGGGGTTTCCT
TTCTAGTGTCAGTAGGGCTTAGGGATGAGTGGCAGGCCAGGGCTAAGTGCTGGCTTAGTGTGTGAGAATGAGCTTGATCAACAACACTGCAGAGAAA
GGGCCTGGTTGGGGGCAGGGGTCTGTAGGGAAGGAAGAGAAAAGACAAAAGACATGCCAAGAGGGAGGCTCAACTCTGGCACTTTACGACCCACAGG
TCCAGGCAGCTTACTTAGCTCCCTTGCCTCTGTTTCCCCGTCTGTGAAATGGGATGATATTGATGATGACACTCTCTTTACCTCATAGACTGGTTGC
GAGGATTAAATCAGTTAAAGACGTAAACATTTCAAACTGTGCCCAGCTCAGGTCAGATATACATCCATGTTAGGTGTTTTTGCGGGGCTCCCCTATG
CCTTTATGTGCTGTGTGGCTTCAGGCGCTAGGCTCACCATTGTTTCTCACTCAAACGTCAGCCCACCAGCGGGTAGGCAGGCCAGGCCTGAAGCCAC
CCAGCTCCCTAGGGACCCAGACAAGCATTGCCCACGAAGCAGAGGGAAGGCTTGCCTGGGAGCCAGGTAGTCTAGTTTCTAACAGCAGATAGAAACT
CTATAATCTGGGCAGCTAGTAAAGCCCCCACTGTGTGCTGGGTTGTTATCAAGCAACTCAAGGAAGTTAGTGAAGAGTTGGTAGTGAGCCGTGATGG
TGTGACACTAATGCTTCAGTGGTCACCTCATTCTTTTTCTCTCACTCTTGGCCAGTCCCAACAGGAGACAGTCTCTTGTAGCCCAGGCTAGCTTGCA
CCTCCTGACCCTCTTGCTTCTGGCTCCCAAGTGTTCAGGGATTACTACCCACCTTCCTAGCTTTCCCTTGTCAAAAGGGCCCAGGGCTCTGGTTGGG
GAGAGCTCAGTGGGAGATCAGTTGTCTGGCAAGCTTGAGGCTTTGAGAGGTGGGGTTGGGGACTCTAAGCTCAGGACAAGGTTCTTCAAGGCCACCA
ATTCAAACCCCCAGTTCTGCCTACTCGCACTCTCTCTTCCCAGTGGGGAAACCTGGACTTCATCCCCTGACAGCTGAGGCCAGAGGCTGCTGGAAGT
GGTGCTGCTGTGTGCCATGTTTTGCTGGAGCCTCTGAGCAGAGCAACCGAGGCTCTGGGTGTTGAGTGTGGGGGAAGGGTGTTGGGAGGCAGCTCAC
AGCATACTCTGATTAGACTCTGATGAGCCATATACCTGTTCCCAAGAAGCCTAGGGCAAGCTAGTTTGTTCTGGAAACCCAGATTCCTCATCAGGGG
ACAGAGATGATCAAAAGCTGATCAAGTCTGTTACATCCAAAGTTCTAAGCAACTACAGAGTCCCTCAATGGCCGCGTTCGGTTCACCCATGCCAACG
AAGCTTTTGTGTCTCTTCTGACCTACCCCAGAGTTTGCCCCTGGCCCTCTTTCCAAGGCTCCTGCATCCAGGACTTGACCTTAGCTAGTGCCTAGGT
CTCCTTCTTCCAGGACACTCTGCCCTTTATTATGAGCCTGGAAGAGGGAAGGAAAAGGTAGAGTTTCTGGTAGTGCCTTGCTTTTTCTACAGTAGTT
AACCCTTTCCCCCCCGAGTGTACTTACCGGCGCTGTAAAATCCCAAGGGTTGAAATGTAAGAGGTACAATAATGGGGTGGCTTGACTGAAGTGAGAA
GGTTGGGGGGATGCCTGCTGAGAGTTTCCTTTTGCTCTTGAGTTAAACTAGTCATCAAACGGAGCCTCTGTCGCTAGTGAGAGGGGAGGTGGCACTC
TAGAAACTTCTAGGGAACTATAAAGATGGTGGCGGAGGCCCTTGTAGACAGAGCACTTGATGCCATCAGAGACAAACAGGCTCTTGGTGTCCTCTGT
ACTCTTGGGGAAGAGGCTAAGAGGGCTTTGTGGGGAGAGAGAGAGAGAGGGGGGAGAGAGAGAGAGAGAGAGAGAGAGAGAGAGAGAGAGAGAGAGA
ACACTGTGCTAAGACTTATGCTCCCCCCCCCCCAAGATGGAGCTGTGATCACAATGGCCTCTGCTTCCTTTGTCCTTTATATTTGGATTCCTTCCCA
TGAATGGCTGTTAGTCTCCACATGACCCACGAATCCTGGAGTCCCTGGGAGATTGCTCTGCAGGAGCCCTGCCATCTCTACCAGGGCACCGGGGCCC
AGGCACTGGGCAGAACTTGATTCCTGCTCCAATTCTTCATTTCCAACCCAGGGTTATTTTTGTGGCACAGTACAGACCTACACAGTGCCCCCTCCCC
CAGAGGCTCTGCTGCTCCACATGCCCATGTCAGAGGGACACTGCTTGAACCGGTGCCGTGCCCTTTGTGGGACACCGTGTCCCCAAGGAAAGTCAGA
AAGCAGCACACAAGGTGCCAGGCTTCTCAGAGCCACGGATCATCCCTCCCCCACCCCAGCCCATCCTCTGGGAAGAAGTGACATCCATACTAGGCCA
CGTGTTCTGTGTCTACAGTGCCATCTCCATTGTCTGCCTGCAGGTCCCTGGCCCTGGGCCAGCAGTACACATCTCTGGCCTCCCAGCCTCTGCTCTG
CGGCTCCATCCCAGGCCTGGTCCCCAAGCAACTGCGCTTCTGCCGCAATTACATCGAGATCATGCCCAGCGTAGCAGAAGGTGTGAAGCTGGGCATC
CAGGAGTGCCAGCATCAGTTCCGGGGCCGCCGGTGGAACTGTACCACCATAGATGACAGCCTGGCCATCTTTGGGCCTGTCTTGGACAAAGGTACTT
GCCTGAGACTCGGTGGGAGGTGGCTGGGAGACTGGGGGTGGTGGGAAGGGTTCTGGGGACCCTGTCCCCTTCCTCCCACTGTGGGAAACCCTGAGTC
CAAGTTCTCCCTAGGAGGGTAATAAAGCTGGTGGAAAGTGGGTGGGGTCCATCTCTGGACAGGACAGGCTGTGTCCACATCGGCTACATCTTTTCTA
GTGCTACAGGGGGGTGGGTAGCCCTGAGGTGCCCCAGTGTCCTGAGATTGGAGGGCAGGCACCAAGGAGCCCGGAGCCTTCCTTCCCGGATGACACA
GTGGGGGCCCAGTCTTTGATGTAGACATGTGTGACATTTCCCTTATGCTGTGTTAAGTGCTATGCAAATACAGCTTGGGGGTGGGGGTGGGATGGTG
CCAGGCCTAGGTGTTGTGCCATGGAAAAAGTCTCTATGCTCTGTCAAAGCTGTCTGGTGCTGGTAGCACTACATGACCCCCGAGGGTCCCCTGAGAG
TTCCTGTTGGTTCOCATAGCCTGAAAGCAAGACGCGTCCATTAACCCTGATGTCCTGTGGATCACGCTCGGTGATCTGGAAGTCTGACCAGCTGTGA
CCCTAGTGGATGAAAGCCGGCTTTTGACTTTGCACATGGGGCATAGGAGAGGGTTGAATGGGGTAACTGCTCCTAAGAAGGGGACTTTGGCTCTAGA
ACCTCTCCTGTCCAGGAATTTAACGGCCTTAGCTGGGCTGGCCTCGACTGGAGTTTTGCCAGCCGATGGGGGCGAGCCTGCTCTGAGAAGGTTCGTA
AAAGCTGCATTCACAGCCAAAAGGGAGGAGTCCGAGAGCTAGCGGGAGGGTGGGCGCAGAGTTTGGGAGAGGGGAGCTATCCCCCCTCCTTTGGAGA
AAGCCCTCTCCCCCTTTACCTGTGCTTCAAGTGCAAAGTGTCTGTACAACCTACAGGCAGAAAACGCAGGCTATTGTCGTGGGACAGGAGGGCAATT
AGCAAATCAATGGATGATGATTCTGTTTACGCTTCTAATACCAAAGCTAATTATTCCTTGTTTACATAAAAGGTTTGGCCTCTAATTGGGGCCAAGT
GGCGGCGGCGGCTGGCTTTTCAAAACTGATCTCGCCCGCCTGTTGGTCTCACCGCCTTCCGGCGCCCCACCTCAGTCCAGGTAGCGTTTAATCAAAC
TGCCAGGCGTCCCGACGCCTCCCCCAAAGCAACACTGGCCTTCTGATCACTCCTCCCACCCAGGATAGTGTCCATCGAGACCTTTCAGCATGATACC
CGCTCGCAGTGGGTCTGATGTTTAGATTCGCAGCAGTGGGTTGTGCCACATGCCTCCGTCCCACAGCAAGAGGGCAGTTTGTGTCCCAGTGTGCAAG
GAAATATGGGGCTGAGACAGTGGGATTTGATGAAGGCAGTGGGGTGAGGTTCCAGGAAGATGTACCCGCGTCCCGGTACCCTGTGGGCAGGCGGTGG
GTCCTGGCCACTTTTGCGCACGTCCTAGCAGGTGCGGGGTGGGCGGCCGGAAGGCGCAAGGCCGCGGTCCTCCGCGGCTCCGGAGGGTTCGAGCGCC
GCCCCCCGCCGCGCGCCCGCTGCGGTCGCCGCGCAATTCACACGCCCTCTGGCCGCCGCCTCCCGGGGATCGCGCTGCCCGGCGCCGGGGCTGGGGG
CGNNNNNNNNNNNNNNNNNNNNNNNNNNNNNNNNNNNNNNNNNNNNNNNNNNNNNNNNNNNNNNNNNNNNNNNNNNNNNNNNNNNNNNNNNNNNNNN
NNNNNNNNNNNNNNNNNNNNNNNNNNNNNNNNNNNNCCCAGGCTAATCCCCGCCCCGCCCCCGCCACCCCCACTGCCCCGGCGCTGGGAACTGAGCG
TGGCGGGGCCGGGTCGCCGGAAGCCAGGGGCGCCCTCCCCTGGGGCGAGAGGGCCGGGAGGCCTGGATCACCGCCGTGCGCAGTCCCCCCCGGCTTG
GCTGGACTGCTGAGCCAGCTCTCGCTCCGCGCTCCCCGCCGGGCTGCGGGAAAAGTGGGACGCGCCCCTGCTGTGCAGGTGGCGCACGAGGGCTTCG
TGTCTGCAAAGGCTGCTGTGGCTACTGAGTATCTGGTTCCCTGCATATTCAGCACGGGCCACGACCTAGGAAAGGAGATCCGGCTCTGACCACCTGT
GCAGTATAGCACGACCCGCTCTGGGAACCTATAAAAAGAGATGGCCCGGGCCGTTGGCCTCGCCCGGCCCTGTCTGTAAAATAGGGTTTAGAACATT
GTAGGGAATAAAGCACAGGAAAGACAGATCTGCGCGTATGCAGTACTCAGGGAGTGGCTCTCATTGTAACAAGGCTGGTGATGCCCGCTGAGACTCT
CATCTCTGAACCCTGGGCCTGAGGCCGAGAAACTGCCTTGTCTCGACCCTCGTGGCTTCGTAGGAGGAGGGCAAGAAATGGGCAGCCATGGCTGAAG
ATGCTGCACCTACTTTACAGAGTGTACTGTGAGGCACAGATGAGAAATCTGCCTACGGGGAACTGAGGTTCGAGTGGAACGAGTGGATTAGTAGGTT
TTAGGCTGCAGGTTCCAGTCTCCAGAATGGAGGACTCAGAACTGTTAGGAGGAGTGTTTCTGAATGTGCAAGGTTGGAGGCCAAGAGCCCAAGGACA
GGGCGTGGCCAACCTAACTCTTCAGAGAGCATTCCGGTCCCACCATAGACCCCTCCATCTTAGTAGCCCTGCAGCTCTGAACTCAGCTTGCCCATCC
ACAAAGAGAATACTAACTAGGGTCTGAACTCTTTAGAGCAACAGGAGGGCACCTGGCTCTCTTCCCCCAATGACTGGTGAGCCTTTGCGCTCTTCCC
CAGCCCTCAGGGCAAGGCTGTGTATGTACCCTAAGGCTCCAGGCTGAACATCTTCTCACACCATCCCTCTGCAGCCACCCGTGAATCGGCCTTCGTG
CATGCCATCGCCTCGGCTGGTGTCGCCTTCGCAGTCACACGCTCCTGCGCTGAGGGAACCTCCACCATCTGCGGCTGTGACTCACATCATAAGGGGC
CACCTGGAGAAGGCTGGAAGTGGGGCGGCTGCAGCGAGGACGCCGACTTCGGGGTGCTGGTGTCCCGGGAATTTGCGGATGCGCGGGAGAACAGGCC
AGATGCCCGCTCAGCTATGAACAAGCACAACAATGAAGCAGGCCGAACGGTGAGACAGCGACCCACAACTCGGGGGCGGGAGGCACTCCCTGGACCC
CTGCCTTCACGGCCAGGTTCCCATCCACACCCCATAGTAACCCCCTGACCACCCTCCTTCCTCTCTTCCAGCTGTCCTTTGAATAGGTTTTTTAAAG
TATATTTACTCATTCTCAGTGTGTGTATTCCATGTTGTGTATGTGGAAGTCAGAAGGCAACCTGTAGTGGTCAGTTCTTCCCACCATGTAGGTTTCC
AAACTTGAATCATGCTTGATGCTGTTCCTGGATCTTTTGAGAAATCTGCCAAGGAGTGCAGTATGGCTGCCCCATAGGAACAACACCCATAGGCTAC
ACTGGTTGGCAGGCTGTGCCTGTGTACGTCTGTGATGTGGTTGTGGGTTGGGGACTGACTCTGAATCCAAAGTAGGGTTTCCATAGCATAGCCCTTC
CTATGCTCGTGGAACACTTAGCTCTCGGCCTCAGTTTTTCCATCTGTTCAATGGGAATAACAGTCCCTAGTTTGCACCACTTCTATGGATGAGGTGA
ATGTGAAGCCTGCTGGGGCCGGGGGTGTGACTAGGGACACTGGTTTCCACCCATTCTTCCTGGCACCAAGTAAGAGTAGAGGAGGGTGTGGTACAGA
GGGGAAGCTTTCTCCCGGTGTGTCAGTCTGAACTAGCTGCTGCCCCTCTTTCCCTAGACCATCCTGGACCACATGCACCTAAAGTGTAAATGCCACG
GGTTGTCCGGCAGCTGCGAGGTGAAGACCTGCTGGTGGGCCCAGCCCGACTTCCGTGCCATTGGCGACTTCCTCAAGGACAAGTACGACAGTGCCTC
CGAGATGGTGGTGGAGAAACACCGTGAGTCCCGAGGCTGGGTGGAGACCCTGCGGGCTAAGTACGCGCTCTTCAAGCCACCCACCGAGAGGGACCTG
GTCTACTACGAGAACTCCCCCAACTTTTGTGAGCCCAACCCAGAGACGGGCTCCTTTGGTACCAGGGACCGGACTTGCAATGTCACCTCCCACGGCA
TCGATGGCTGCGATCTGCTGTGCTGTGGCCGGGGCCACAACACGAGGACGGAGAAACGGAAGGAGAAATGCCATTGCGTCTTCCACTGGTGCTGCTA
TGTCAGCTGCCAAGAGTGTATTCGCATCTACGATGTGCACACCTGCAAGTAGTGAGCCAGGTAGGGCGCGGGGCGGGACGTGGGACTGCCCTCTCCT
CCCATCCGCTAGGCCTGCTCTTCTGATTCTCGGCTTCCCAAGACGAACAAGTTCCCAAAGCTGAAGTCAGAAACTAGGCTTCCCACGCTTCCACGGG
AATGGTCTTGGGGAGCGACTTGACGTATTTACACGAGGCTCAGATAATGACTGAGGGTGTGCACGTCAGCCACAAGCAATTGATTAAAATTCTTACA
CAAATTAGCAGTGATGAGCCAGACCAGATTTGTTCATGGCTGCTGGCTGTCATTAGTGAGCATCTATTCGGCCAGAAGAGAGGTTGAGGTCTGGTCC
CAGCCATGCCCCTAAAAGTGTCATATCTCAGGGCCTCAGTTTCCCTACTGTCTAAAGGAGAGGTTCAAATGTCAGAAACAGGGGCAGGGTATGGTGG
GACTGGCCTTTAATCCCAGCACTTAGGAGGCTGAGGCATCTGGATCTGAGTGTGAGGTCTGGCTGGTCTCCATAGAGAGTTCTAGGCCAGGACTACA
CAGTGAGACCCTGAGACAGTCACCTAGTAAGTCTCTCCTAACCCTGGGGCAGAGTCATTTCACATCACCCATGAACTGAGAGGGCAAGCTTTGACCT
AACACAAATCCTCCAGAGCTTGGGAAGGTGGGTGGGGGAAGCCAGATCTGAAGCTTGGGTGGAGCGGGAGCACTCTCACCAAGTTTATGGAGGGAGA
CAGGAAAGAGGAGAGCTCCCAGTTCAGAGCGGCTGGGGTGAGTGACCGTGGGATAAAAGCCTGGTGGATTATGCTTCCAAGCTTCCCAGAGGTGGCC
TGCATGCGTGGGAGGACCCCAAGAAAGGTCAGCCTGGAAGCAGAGTGATCCTAGAGGCTCTGGCATGGGCCAGTGTGACCCTTGTCTCTGTCCCCTC
CCCTGAGAGGGCTCTGCTAGTGAGTCTGACTCTCAACTGGCTTTTCTTATTTGTCAACCAACAACTCTGGCTTCAGCATCTGTTACCTTCCCCGAGC
AGCTGTGAGGAACGTGGGAAACCACATTGGTTCCTGGAAAAGCAGCTTTCTGTCCATCTATGGATGGCCAGCGCAGTGTGTTCCACCCAGGGACCTT
GGAGCTGGTGACACACCAGAGCTGGTGGCTCATGTCTGCGCTCTGTAAGGGTGGGGGGGTACCTGACATCACAAGCCCATCTAAGAAGTTCCTTGTG
GGGCTTAGGTTCCATTCCCAGGGTCCCTCTAGAACCATACAGGAGGCGTGGGTTTTCTTTATCAAGGTCAAGGCTGGAAGGAAGACAGCGGCGAGCT
TTAGCGCTTCACGCGCCCACTGCTGAACCTCGCTCCTCATCTGCGCAGTGATGGCAGTATGGGGATCTTGATGGATTTTTATAAAGCTCAAGTTAGT
GGGTGTGAATGCTGCTCTAAGTGTCAGGGTTGCCATCAGCGTTAGCACGGGGTTGCTGCAAAGGAAGATCCCATGGGCGTTCTTTCTGCTTTTCAAA
GGGATGGGAGAAAAGTCAGCAAGTAGGAAGGTTGAGGTGGAAGGAAGCAGACCATGACGGCCGCCTTCTCTGGTATTCACTCTGACAAGAGTTAGCC
CTGCACCCCCCAATATCAGATAGTACATACATAGCTCTGGCCGTTTTGAGGAGCTCTTGGTGTGGCTTCTTATCACTCAGCTAGAAGGGCCATTTGT
CCTGACCACCCATGTCACTGAAGGTTAGACTTGAGTTAATGGCCTAGATAGACCCAGGGGTCTGCTTCCAGAAGCTTCCTATGTAGGCTTGCATAGG
CCTCAGCATTGCCAACCCAAGCTTGATACATGGGGCAGTGTGGGTCCAAGATACAGAGCCCATGACTCCACTCCGTCCTTGCCCATGTGGGCAGCTG
AGATCTTCCAGGCAGGGAAGGAGGTGCAGGGTGAGCCTTTGTTGTCCAGCAAATCGCTCCACTCCAATCCTTGCCTAAAAATGATCTCCTAAGAAGA
ATTGGGTGTAGCTGGGTAGTAGAACACTTACACCCCTGAATCAATCTCCAGTACTGGGGAGAGGGGAAAGCAGCCCCCTTTCCTCACATTCCTAAGG
TAGACACTTGCTGTTTTTCTAGTATCATGCAGACATGTTTTTAAGAAGCTATGCCCACAGAGTTCACAGCCTTAATCCCTTCCCATGGGGTGGGGGG
TGGAGGGGGGAGGAGGACTGGACTCTCAACCTCACACTTCCTGATAAGAAAGATCCCTCCCACTGGGATGTCCTTTGCCTCTCGGAGCCCAGGTTTC
CTCCTGTGTGAAGTGATAAGGTCTGTGCCCTGCAGGGCTGCTCAGGAGCCAGACACAGCCATAAAGAGCCTGCTCTGGGCTCCTGGTTTGGAGCCAT
AGGCCAGGAGATGGTTGAGACCTGGTTCCTTCCTGTCCTTTCACCCCCGAAGGCGCTGCTACTGATGGAAGCCAAGGGACAAATGGGCAGGGAGACA
GCAGGCATAGAAGGCTCTGGCTTTTTTCTTGCACAAAGGGGCCACAGAGCAGAGCCCAGCAGGCCACATGCCCTTCTCTGAGAAGAGTTCAGCACAG
TGGTAGCATCCAGTCCTCCCTAAGTGGGGAAGACACCTTCTCCATTGCTTGAGGTTTGTCCACTGTCTCCACTTAGCCACTAGCTTGGTATCCGAGT
GCTGGTAGTTTACAAATATCTGATTTATTCTTTTTATCCCTATGTCGGAAAGGCTATGAATCTAGTCACCCCCTCTAACTGGCCCTGTGTCCTGGGT
CTGTTACTAGTCTTTTGTGGGACCTTAGGCATATCCAGGTCGTCTTGCTATGCCTGGTTCAGCTCTGCCAGCAGCACCAGAGATGAGGGTTGGCTGG
GGGTTGGGGGGTGCCTGGGGCGTGGCTCAGTACCTCAGATCCCACGGGATAGGGCTGTACAGAGTGATCATGCTCAGGAAAGCACCCTGGGAGGGAG
TTCACCATAACTAGGTAGAGTCCGTTTCTTTTGGACAATTCACGGCAGTTGTGCGTCTGATGGCAGGCACTAGCCCTGCTGTGACTGGTGGCTCAGA
CTGGCAGGCTTTTCCGTCTCCACGTAGGAAGGGCAATGCTCCCTTGGTTACCTACAGTGGGCTTCCTCAGCTAGGAGGAGGTTTGAGTTGTGTGGAT
GCAGGCTCTGTTCTTCCTGAGGATGGCATGTCCTCCCTCAACAGCAGGCTCTGGGGCGAGGAGGGAGGCAGGGCTGGCAGCGTAGGCAGCCTGTGAT
CTTTGCATCCCAGGGGGTGATGTTGACAGCAGTTATGAGGTTTCTGATTCTTCCTGTTTATTTCCCAAAGGGCACTGGGAAGGGGTAGATTGTGCGG
CTGGATCCATTCATCGAAGTCCCATGAGAAGCAGGATCTAGATCCAGGCCAGCCTTCGGCACTGGCCAGCAAGGAGCATGGACTGTTGCCAGCTGCA
TGTGATAAACGACCTGGACCCAGCCGGCCTCGGACGGACGGGCGGCTTCTTTCTCAACTAACGTCTCTCCCCCTGCTCTGGATGGTGTACCGCTTTA
CAGAGGGGCTTTCTTTATGGTTTTACCAGGGTCTGCTGGGGACAGACTCGAGGCTTACCTTTGCACATGTTAAAGAAAATAAAAATGAAAAAAAAAA
ATCTACCGCAACAGAACAGGCTGGGCTAGTGTGAGCTCTTGGCCTGGTGGGAAGGACAAGACCATGGCGAGATTCTGTGTCCAAGCTGCCTCTACTC
GTGACATTCCAAGATGCCTCTGAGGTGGGAACTGTGAAGTAGGACAGAGCCCCGCAGTCCCCTCTTGTCCGTCGACTCCCATTTAAATTGGACATAC
CTTGTCGTTCTGAGAAAAGCCATAGATAGGTGTAGCTGGGATGTAGTGATGGGGAGGCCCCTGGCCAACAGTGGGAGCAAGATCTTGAGTTTTGAAG
ACCTCAGAGTTCTGGGCGGCCTGGGAAGCCATCTGCAGAACAGAGTTCCTTGTGGGCTCCTGTTTTCGCTAGCCCTGTTCTGCCCTGGAGCGACAGT
CAGATCTCCACGCCCCTTTCTGTTGTTCTACAGTGTCCACCTTTACTACGCGTTTTTTTTTTTTTTTTCATGATGACCTTGTAAATAGGTCAGATGT
GGAGGCAGGTCTCTTCTGGCTCCATCCACCACACCCAGAAAGAATGGGCTGCTCTGCCCTTCTCAGCCTTGCTAACCAGCAGACACCGAGGAGAGCA
GCGGGGCACCTTAGAGAGCAATCTAAACATGGTTGGCAGGTGGGGAGGGTAAAGAGTCCCACTTCCTTTGTGTTAGAAGGCAGACTACCCTGCGTCC
TTTTCTCCCATTGGCTGAAGTAACCAGAAAGACAAGAGATCCTTAACAAGCCCTTCTTCCCACTTGTAAAAGGGATAGCCTATCTCAGTTCCCAAGG
ATCTGGATTAGATAGATATTCAAAAGAGGCAAGCAGCGAATGGAGGCAGCTCCCAGCTCTGTTCCCGACGCATGATGGTACTGGCTGGGTTTAGTAA
GGTGGGTGGGGCTGCACGGATCAATCCATCAACTCCGTCTTAAGGAGAATCAGAAAGAGGAGATAAAATGGGGGAATGGGGCAGAACAAAGAATTTG
TCCTTTCCCGCTTCTGTCTAGGGTCTGCTAATGCTGGCTTGACGAGGGGTCAGCCACTTCTTTCCTGTTGTGCAGTTGGCTTGCCAAGCAGGCTCCA
GTAGGCCCTTGCCTGCACTCTCTACCATGTGACCATGAGCACTGCTCTAGGGACACCTCCCATCCCTTCCTAGCACCCCAAATGCCCCTTCCCATCT
CTCCTTCCAGAAGTTGGAAATCAAGTCAACTGGATAACGCTTGTGTGAGGACACTTGAGCAGAACGGATACAACAATTTACAAGTCTCFTCATATCT
ATGTATTCTATATTAAAAGTGATAAAGTCATGTTTCCGGGGCGTATTCAAGTAGCTGACAAGTAATTATTTAATAATAGTACATGAGCGCATTGTAA
TTATCCTCGCCATAGTCAGGTAATAGCATCCAATGGGAGGTCCCTACCAACCTGCTGTATCCAAAGTTTTGTAAAAAGTTGTAGAAGTTGTTGATCT
TTTTGATTTTATATTCAAAAAGTCTCTTTTTATAAATATTATTTATTATACAATGTATATACCTTTGAGTTAACTAAGATTATATATTATATAAATA
TATATATATTTGGAGAAAATCTATTTCATCATGCAGTTTTTTTCTGTTAAATCATTAAAGAGAAGGTAAACTTCAAATGGACACATTGTACGATGTG
TGGAGTCTCCAGATTCGTCCTTAGGTCAAGGGTATCTGAATGTTGTGCTAATTAAATGGCCAAATTTACGGTCATTTCCTCTGCTCTCTAAGCAAGA
TGAGGTATGATGGACAGCAGATGTGACATGAGCCTTAAAGCATTACTTGATATTAAGTCAGTATCAAACAAGGAATTGCCAACTTGGGGAAGAACAA
CAGGGCCTGCCATAGTCTTACTCCCTTTCTCACTACATACCCAACTCCAGTTGTTGGAGAAATAGGAATTGCTCAACTGTAAACAAAGCTGGACCAG
AAACAGATAACAGCTGAACTGTGGAAGAGGTTGGTAGGTAGGTTGACCAGATGGTGTTCTGCCTGTGCTCTGGGCCAAGTGACAATGGAATTGTAGG
TTGGTTTAGATAGGTTGCTGGGCAGAGCTCTGGGAAGGGCACTCTCTCCTTGGGCTGGAGTTTCAGTGACTCACCCGAAGCCTTTGCCTGTCATCTT
GATGCTGTGCAGTTTTAGGATGATGGGTGGTCCTTCACTTCTCAGACCTCCCTCTAAAATATCCCCTTCAGTGTTCCTTTCTTCTGGTCTACCACTA
TTAGAGATAACGTATTCACACTGGCCATAGGAACATGAAGCAGTCTGCTTCTGACGGTGGGGACTGCCAACACCTTCTGGCCCTCGGTTGACCATGA
CCGCCTGAGCTTCCATTTGGTGCATCTTTTGCCCCTAGAAATCTTTTTCCACCTATGTGAGGCCCCTTGAGGGTAAAAGCAGAGCTCCTGGCTTCAG
TGCTGGCCATCTTTGACTGCATTTCCCTTGAGCTGAATACTCTTTTTTTTTTCTCGCAGCACTCTGGGTTTTATTTTATTTTATTTATTTTTTTGAC
TGTATAAGGTTGCCAAGTATTTAGATGGTCCCTATCATACTTACCAAGGCCATTTGTCTCCCATGATCATTGTATTCCATTAAAGAGAGTACAATTT
ATAGCTATGCTAGAACACTAGCTGGAAACACTGGAAAGAACAAGTTTCAAGTTGTGCCTAAGTCGTGTGTGCACCTTTTAATTTCAGCATCTGGGAG
GCAGAGACAGGTAGATCCCTCTGTTCTTGGCAGCCAGTGCTACACACCAGACTTAGTGGGTCTTAAAAAAAAGGTTTTGAGAATAATTTGAGAGAAG
ATAAAGGGATATGGTGAGGTTTTTTTTTTTTATTGAAAGCAACACTATTCTGAAGGCAGGCTGTGGGTAAATGGATGGGCACAGAGATAGGAAAAGG
AATCGAGGAGAAAGACAGCAAGGGAAACGAGGCGAGGCTGTFTTGGGTGGAGTGCTGGTCGACCTGTGTAGTGCTGGGCATAACAGCACGTAACATG
GGTGGTGTGGGTCTACATTAGGAAGTGAGTTCAGCAAAACGTATGGTGTTAAGCCATGACTGGCTTAACAGAACTTGGGAGGCAAACAGCTATCTCA
TCACTAATCAATCACCAAATGTTCATTATGGAGACTGTGCTGGAGAATCATAAATACATGTCATTACAATTTCTTGTTTGGACATAGTCTCACTTTG
TAGTGCTGGCTATCCTGGAACCATGCAGAATAGGCTGGCCTCAATCTCGTGCTGATCCCCCTTCCTCGCTACCTCTGGGATTAGAGGTGTGCACCCT
TCCTCCCGATCTTGGGATTCCTGCAGATCACAGGTGTTATCCGTGCTCTGGCATCACGACACACTCACACCCCCTGGGCTGTCACTGGGGCTCAGCC
TCAGCAGTTGTCAGCAAACGAGTGGCTTTCATCTTGCAATAACTTCTAAAATTTAAATGCTGCTTTTGAACTCTTAGCAAACCTTGCCTGGCTTCAC
TTATTTGAAGGCGGCAGGCGGCCCAGCTGCCAGGCAAGCAAACTGAAGTCCTGGCCTTGCCTTCTGTTTGGCCAGGTGGATATTTATAGCTGACCCT
GCTTCAGCAGGCCTGTTGACCAGGCTTTGATTATTAAATGATAACTGAATCTCCTCCATGATTCTGTAACATAAGGTGGGAAATGTAAAGGCTGCTC
ACTGTAATTTTTAGGCAATAAAAAGACAGCCTTAAAAACACATCTTAGGCTCGATAGATGCCCCAGTGTTGGGGAATCGAGGGCGGGGAGGTGGGAG
TGGGTGGGTGGTGGAGGAACACCCTCATAGAAGCAGGGAGAGGGAGGATGGGATAGGGGGTTTCTGGGAGGGGGAGGAAAGTGGAAAAGGGCTAACA
TTTGAAATGTAAATAAAGAAAATATCCAAGAAAAAAGAAAAAAGTATTCAAAATATATACATATAAAAAAAAAACCACATCTTAGATTCTAGCTACA
GTTATGCATGTTTTTGGATAGTACATGAAAAAAAAATCCTCAAAAGAAGACAAAAATGTAGTAAGGAAAAAATGAGCTCTTCTTTGGAAGATTTAGT
ATTTCCTGACAGCCGGTGTGTGTGTGTGTGTGTGTGTGTGGGGGGGGGTCATCAGAGCCCTCCACACTGTTCACAGGGCTATGCTGTGGGCTGGAGG
TAGGAAGGCCTTTGGGGATCCTCCCAGAACTGGAGGTGGGGGCAACTGCTGTCCCCCAAATTGCTGGACATGCCTCTTCTCTACACAGCATCCATTT
CTGGGCTTCCTGGTGCAAGGACTGGGGCTGTGGCATCTAGTATCTGAGAGATCCAGAAGGTATGAAGAACAGCAGGGTGAGCTCGGGGGTCTCAGGT
TTGCCTGCTTCAGAGAAGTCATTGTACCGCAAAGCAGCTTCCACCCAGCTCCTGAACAACCGAGCTCATGGCTGCAGTTCAGACTTTTTAAGGTAAA
ATAGGTATCAAACGTAAATATGAAGATTCTCGTACATTAGCATATACTAATGAACTTTTGAGGGGTTTGTTTTGCTTTTGTTTTTGGAGACAGGGTT
TCTGTGCAGCTCTGGTTGCCTGGAATTCACCCTGTAGACCAGGTTGGTCTTGAACTCACAGAGACTCACTTGCCTCTACCTCTAGAGTGCCTGGATT
AAAGGCATGCGCCACCACTGCCCACTGAACTTTTTGTTGTTGTTGTTGTTGTTTGAGAAGAGTCTCTCTGAATGAATGGTTCCCAACCTTGCTAACG
CTGTTTGCCTTTAATGCCGCTCCTATCATGATGACCCTCAACCACAACCTTGCTTTTGTTGGTATTTCATAACTGTAATGTTGCTCCTGTTGTGAAT
TGTAAGGTAAATACCTGTGCTTTCTGATGGTCTTAGGTATAACCCGTAAGTTGAGAACTACTGTCCTACAGGGTCTTGGGACTCACTATGTAGAGTA
GGCTGGCTTCCAACTCAGAGATCTGTCTCCCAAGTGCTGGGATTAAAGGCATGTGCCGTCAGCTTGCATGCGTATCTGTGTGCCATGTGAGTTACAG
TTGTACACTGCCATGTGAATTCTGGGAATTGAACTGAGTCCTCTGGAAGAGCGGTAAGAGCTCTTACCCACTGAGCCATCTCTCCAGCCTCCTTAAT
GTTTTTCTAAAGAGATTTAAAAACAAAACAAAAAAAAATCTCCTATGCTGTAACAAAGCAAGGAGGGGTTTCTCTTCTGTGGCCACTTCGTCATGCA
GCCCCATTAGTGATTGATCCTGTTCCATATAAAATACTGGTCTATACAATATTTCAAGTATATTTACTCTTTATTGCATTCCTTCAATTTGCATTAC
ACAATATAATATCTTTTTCAATATAATTTTGGACAAAAACACAAGACATTAACTTCGTTGAACAAGAAACATAAATTAATTCATGTACGACTTTGTT
GGGAGGAGAAAGGCAGAACCGCAGACAACAGGGACCACGGCGGTGGACAGGGAACCACGGTACTAGCCACGGGAATCACAGTTTCACAACACAATTC
ACTCTTTCAAAGCCACAAAATAAGCCAGGGATGAAAACCCCAAACAAGGTATACAGACGGCAAGACTAGGAGATGATTTGCCTTCTACTGTGGGGAC
AGTGTCAGAGTATCACCCAGGTGCCCCTGCGGCAGCAAGCCTCCCGGGCGGCTTCTGATGGCTGTCTTTGTGTTTGAAGCAGCAGCGGGGAGAGTGG
CATGCGCCCTAAGACTCATCTCCACGAATGACGTGACGACCTAATTGCATTCCTTCTAACCCACTGATTAGGCAAACCACCCTCCAAAGGGCTCGCT
GAGTTCCTCTTCGGGAAGAGGTGTGTTGAGTACGCTGGAATGGATATTCGAGGGCTGAGGGAGAGGACTAGGGGGTGGCTTGTTCTGCTGGAGAGTA
GTGTTTTATTTATGTGCTGCAGACACTACAGATCACTTGAGATACAAGGAGGATGAATTGTAAGTCATCAGGCTGAGGAAAAGGAAGACGATGGCAC
TAATAGGCCTCTAACGTCATCCTAAGGAACTGACCCACTTAGAGCCGGACGCTAATTAGAATTGAGAGGCTTGTAAATTATTTTAATTTTTTTTCTG
TTTAGGGATGTACAGATTTCCATATGTATCTTTCATAAGGTTTTAACGGCATCTACCAAGTGGCAATGATTAGCATATCTCTTACCACAGAGCAAAT
TAATTACACTCAGAGCATATCACAGCCACCCCAGGAATGATTTGACTTCCGATTAGAAAAGCTNNNNNNNNNNNNNNNNNNNNNNNNNNNNNNNNNN
NNNNNNNNNNNNNNNNNNNNNNNNNNNNNNNNNNNNNNNNNNNNNNNNNNNNNNNNNNNNNNNNNNNNNNNNNNNNNNNNNNNNNNNNNNNNNNNNN
NNNNNNNNNNNNNNNNNNNNNNNNNNNNNNNNNNNNNNNNNNNNNNNNNNNNNNNNNNNNNNNNNNNNNNNNNNNNNNNNNNNNNNNNNNNNNNNNN
NNNNNNNNNNNNNNNNNNNNNNNNNNNNNNNNNNNNNNNNNNNNNNNNNNNNNNNNNNNNNNNNNNNNNNNNNNNNNNNNNNNNNNNNNNNNNNNNN
NNNNNNNNNNNNNNNNNNNNNNNNNNNNNNNNNNNNNNNNNNNNNNNNNNNNNNNNNNNNNNNNNNNNNNNNNNNNNNNNNNNNNNNNNNNNNNNNN
NNNNNNNNNNNNNNNNNNNNNNNNNNNNNNNNNNNNNNNNNNNNNNNNNNNNNNNNNNNNNNNNNNNNNNNNNNNNNNAAAAACCCAAACCCTATTC
ACTAAGAAACACTCGAGGCTTCCTGTTCTCTCTACATTTTCCACCATTTGTTTGCTATTTGATGGGCACTTTCTAAAAGAAAATGGTCACATTCCGG
GCACTTAAAAGCAGGTTCCAGTGAATCATGGACCATCAAGTTTTCTCTGCTCTGTGACAAGGAAGTCTTGTGAAGCAAGCCAAGGAGAGCAGACCAA
CACGACAGCCTGCTTCCTTGCTTGGTCCCTCAGACCCACAGCACAGCGAGGGGCTAGTGCGTGAAAACAAGGCTATACAGGAAGGAAGGAAACCATC
AGCGGGCTCATATGCGCTGGGGAAGACTTGGGACCTCGCAGATGGGTGAGCACTGCGTGTACTTACGCGCCTTCTTCTCTCATGAGGGCCAAGAATT
TCCTCACACGGTACTCAGGATCCATCTAAAAAGCATCGGAAGAAACAAATCAGACGCGCGAAGCTGCCTTTTCTCCACAATGTGCTTCCTCCGCACC
AGGGAGGCGCGTGGTCATGTGCTTCCTGGGTCGTTCAGAACCATGTCACCATTCCCTAGTTGTTGTTTCGAAGCATAATAAAGTGGGTTATGTTATT
TAGAAGCCAGTGGAACTTCCCAACACGGAGAGGCTACTGGTCACTCACAGGCACCTCAGCCAAGCACCCCCTGCACCCAGTGTGTTGGTGTGAGGAG
GAGAAGCACACCAGCCAGGTGTCACCACAACACTAGATCGTGGTCACTCACGGAGGGGTCCAGACATGCCTGGGTGCATTCATGGTGCTATAAATCA
TGAGAGTTTAAATGCTAAAATTCATATATCTTATTGAAGGAGGAGGATAGAACCTGAGAAACCAAACTGAGGTTGATTAAGTGACCAAAATACAGTT
AGAACTTTTTGTTTTGTTTTTCGAGACAGGGTTTCTCTGTATAGCCCTGGCTGTCCTGGAACTCATTCTGTAGACCAGGCTGGCCTCGAACTCAGAA
ATCTACCTGCCTCTGCTTCCTGAGTGCTGGGATTAGAGGCATGCGCCACCACTGCCTGACTAGTTATGACTTTCACATACTCACTGAACTGGCATTC
TTAGCTTTAGTGCCCTTCTGGTGACGCTGCCACACCTAAGAGAGCAGAGAGTGCTGTTGGCCTCCCCTCTCCGTACACCTGGCCTCTGGTAGCCCGA
GAGTCACAGACTCAAGACAAGGTGGTTTGATCCGGGTGATGGTTCAAGTCACCATTACTAATTATCTCTCCTCGCTGTCATTCTGGATCCAAGTTAC
TTCACTTCAAAGTGTATCATAGTCTTATTGGCCTGACTAGGGTGTGTGGGGATCTGGAAAAGAATAATCACAAACAAACATCTCTAATTACTCACTA
TGAATTTGTACTGTAAGAAACACCTCACTTTTAAAGCATGTTGCAGGGCAGAAGTCTGCTGGCAAGAGGGAACTCCCTGCCCTCCAGGAGTGGCTGG
GCTCGCAAGGGCTCAGCTCGCGCAGCCGTGGGCAAGAGTGCACTCAGACTCCCCTCCAAGCAGGCTGGAAAAGCGACAGTTCTGTCCCAGCAAAACA
TGGAACGTAAGTTTCAAATGTATCAAAGTTAAGGGGTCAGACTACAAAGAACTAAGAAAAAGTGTGAACAGCTAACAAAAGAGTCATTTTTTTTCCC
CCTCTATGGGACTAGAATTACACATGAATCAATTGTCAAAGCTTTTTCTAAAAAATGGAACTGGCTGGAGCTCGCTGGAGTCAGTACATGCAGGTCT
TCGCCCATTAACTCTATTTAATATGTGTGAGGAGCGACTTACTGACTTGCCTGTAGCTATGGAATTAAGAGTCAAGAGAAAGGGGAGGAAAAAAGCA
ACCTAGATAAATGACTTTATTCCCTCAGGTGACATCCAGTCAGAGCACATCCTTAACACCGAGCAAGTTTTAACAAAATCGAGTCCGGCGAGCAGAG
CGAGTGAGCATGGCTTCCATTCTGCTGAACTGCATGCCTCTCCACTCGGGCTCTGCCCCTGCTCCTGAGGCAGATCTAAAGAGAAGTCACTCAGCTG
CTCGGAATCCATTTGACGTGAAGGGGTTCAAACTCCAGGCCTATGAAGTGTCAGTCGCTCAAGATTAGGCCGAGCGCCCCACTCTCACTTTCTACCT
CACACACATAAGTATTAACTTGATCACTGCGCCGCAGGCATCAAAGGGAGAGGAGGCAGGGGTGGGGAGGAAAACTCGCATAGTTTCTCCTATGCAA
TTATTTTAAAAGATTGAACTGAAACTGGAAAAAGAAGGGCAGAGCTGACTTCTGACAGATTTATCTTTTTTCGGGGACAAAGCCAATACACCTGTAT
GTATGCCTTTACCAGGAATAAGCCTGAGCAGGGTGCTTAGTCTATGACAATAATTTACTACTCATAATGGAAACTATATAAATTGACTTAAAAACAG
TTGCTGGAAGCTTGGGAAACTTTTGGTTTCTGAAAAACCACAAAAATCTAATTTTAAATTGAGTTTATCAGAGAGAGAGTTAAGATAATTCTCTCCA
TATTTCTTATTTATTGGCCTAAGAGCTTCCTTCAGATGTGAAGCTGGGGAACCCCAATGTGAGCAGTGGGCGCGCAGGGCTCCACAGTGACACACCT
CCTCAGGTCTGGGGATGGCTCACTCCTCATTCATTCACTTCTGCTCCTTTCATTGTATCTAGTGAAATTTATTGAGCTCTCTAATACGTGCTGAGCT
GGTCCAGGGGCCAGCGACAGTGTGTGGCAGCCCAGGGGTCTGAACACACGGAACTCAGTCTACACAAGTGTATTATGTACATGTGTGTGTACACGTT
CGGGCACACAGAGGCAAGGCATTCCAGAAGGAGAGAGGGAGGTGCAGTCCACACAAGAAAGTTCCAAACCAAAATCAGTCTCATCTGCCTGTGCCTA
GCAGCAGGCTGGGAGTCAGTTAGTTTGAGATTTCTAGGGCACTGGGCATGGCGGTATGAGCCTTTAATCCTAGCACTTGGGAAGGCAGAGGCAGGGA
TGGTCTCTGAGTTCGAGGCCAGCCTGGTCTGTATAAAGAGCTCCAGGACAGCCAGGGCTACACAGAGACACCCGTCTGGAAAAACTAAAATAAACAT
TTTTTTAGGAGTTCAGTGAGGGGAAACGCACAGTCACAGCCCGATCTGCACAAGTCGGCCGCATCCACACTTCCACATCTCCCAGAGCTCTTAGCCA
TCAGTGCTGTCACATGCTCACCCTGAAGGACGGAGCCTCAGTAGTGAGAGAGATCGGGGCAGACTCACTGACAGACTCTTCTCCCATCTGCATGAGA
CTGGGGACACCTTGCTTCCCTCCTTCCCTTCCAGCCCCCTCTTCATCTTCATTGTCATCCTACAACATCCAGTCTCCCCTCACTGAAGGTAAAGTTT
AAATTATCACCAGGATTTTGCACATCTCCTTTTATTGCTAAGTGCTGTAGATGTAAGCCCTATCCTAAGCTGTTCAGGGTCTCACTCCTTTTCTCTG
ATTGTTAATAAGGACTATGAAATTGACTGTACCCAGGTCACCTCTCTGCAGCCTCCAAGATGTTGAGGAGCCTAGGGCAGGGGTGGGAGTGTCTTTT
CCTCCTTGTTGAATGTCTTCCATGACGGGGCAGTTGTAGTTTTAAATTCGCTTTGAAGCCCTTTCTGATTTTGAGACCTAATGACTCTCTACATTAA
GATTAGAAGTCACGCTCTGCTCTGCTCATTTATTTCTGAAGAGAAAGAGGAGAACATGGGTACTCCTGAGGCCTGGGAGAGGAAAGCAGGCCCTCCT
GGTGTGCTACAGCCATTCCTGTGACTCACGCAGAGACGGGATCGCCTTACCTGCAGGGACATCTCAATCAACATTAGTAACTTCTTGATTCCTATCC
AGACTTTCTTCCCTTTGACTTGCTGAGCAATTGTGGTGCGTTCCTTATCTTTGAAGTTGCCCAAAAGCTATAAAAGCAATAAACAACAATTAGACAC
TTTTATGGTGTGCACACCAACATTCACCTTTAAGTGAACAGTGGGAGGAGCTACCTGCCTGGGATGAATTGACCCACCTAGTCCTGTATGACCATAA
AAGACAAGGTCTTATTCTGTAGCCCAGACTAGCCTCAAACTCATGGTAATCCTCCTGCCTCAGCCTCCGCGGTGCTGAGACTACCTCATCTAGAAGA
GATAAATCTTATGCTGTTTTTCTAAGGGACCATCACTAAACTGAGAGACGCGTTTCCTAGGGAAAACAGCTCCAATCTATGATAAATACAAGTTAAA
CGTGTTAGCATTCCTTCCTGGGCGCAGTTCGTATGTGTCAAAGTACGCTGGTCTTTTCTCTTTCCCAACTACAACAGGGTGTTCAGACAGGTGACCC
AGGCACACTTCTCATGCTGTTGGCGTCTGCTCTGTTGGGAGCCCACGGCAACTCTGAAGTTGTGGAGCCTTTAGGCAGCCTCCCCGACTCGACCACA
CCGAATAACTTACATCACCTTTTCCATCAGATCCCATCTAGTCATCTGTGCACATTAATATTAATCAACACTCACTCGAAGACTCACTTTTTTTAAT
TAAAGGCTTTATCATCTTCAAAAAAAAAAAAAAAAAAAAAGGAAACATTTCCACATTATAAAGTTGTGAGGTTTGGGTAGCGTTCTTTTCTTTTTTC
TTTTTGGTAGTTCCAAAGG
MOUSE SEQUENCE - mRNA
CCTCTTCATGATCGCCGGCAAACTTCCTCCTCGGCGCTGCTTCTAATGGAGCCCCACCTGCTCGGGCTGCTACTCGGCCTCCTGCTCAGTGGCACCA
GGGTCCTCGCTGGCTACCCAATTTGGTGGTCCCTGGCCCTGGGCCAGCAGTACACATCTCTGGCCTCCCAGCCTCTGCTCTGCGGCTCCATCCCAGG
CCTGGTCCCCAAGCAACTGCGCTTCTGCCGCAATTACATCGAGATCATGCCCAGCGTAGCAGAAGGTGTGAAGCTGGGCATCCAGGAGTGCCAGCAT
CAGTTCCGGGGCCGCCGGTGGAACTGTACCACCATAGATGACAGCCTGGCCATCTTTGGGCCTGTCTTGGACAAAGCCACCCGTGAATCGGCCTTCG
TGCATGCCATCGCCTCGGCTGGTGTCGCCTTCGCAGTCACACGCTCCTGCGCTGAGGGAACCTCCACCATCTGCGGCTGTGACTCACATCATAAGGG
GCCACCTGGAGAAGGCTGGAAGTGGGGCGGCTGCAGCGAGGACGCCGACTTCGGGGTGCTGGTGTCCCGGGAATTTGCGGATGCGCGGGAGAACAGG
CCAGATGCCCGCTCAGCTATGAACAAGCACAACAATGAAGCAGGCCGAACGACCATCCTGGACCACATGCACCTAAAGTGTAAATGCCACGGGTTGT
CCGGCAGCTGCGAGGTGAAGACCTGCTGGTGGGCCCAGCCCGACTTCCGTGCCATTGGCGACTTCCTCAAGGACAAGTACGACAGTGCCTCCGAGAT
GGTGGTGGAGAAACACCGTGAGTCCCGAGGCTGGGTGGAGACCCTGCGGGCTAAGTACGCGCTCTTCAAGCCACCCACCGAGAGGGACCTGGTCTAC
TACGAGAACTCCCCCAACTTTTGTGAGCCCAACCCAGAGACGGGCTCCTTTGGTACCAGGGACCGGACTTGCAATGTCACCTCCCACGGCATCGATG
GCTGCGATCTGCTGTGCTGTGGCCGGGGCCACAACACGAGGACGGAGAAACGGAAGGAGAAATGCCATTGCGTCTTCCACTGGTGCTGCTATGTCAG
CTGCCAAGAGTGTATTCGCATCTACGATGTGCACACCTGCAAGTAGTGAGCCAGGGCACTGGGAAGGGGTAGATTGTGCGGCTGGATCCATTCATCG
AAGTCCCATGAGAAGCTGGATCTAGATCCAGGCCAGCCTTCGGCACTGGCCAGCAAGGAGCATGGACTGTTGCCAGCTGCATGTGATAAACGACCTG
GACCCAGCCGGCCTCGGACGGACGGGCGGCTTCTTTCTCAACTAACGTCTCTCCCCCTGCTCTGGATGGTGTACGGCTTTACAGAGGGGCTTTCTTT
ATGGTTTTACCAGGGTCTGCTGGGGACAGACTCGAGGCTTACCTTTGCACATGTTAAAGAAAATAAAAATGAAAAAAAAAAATCTACCGCAACAGAA
CAGGCTGGGCTAGTGTGAGCTCTTGGCCTGGTGGGAAGGACAAGACCATGGCGAGATTCTGTGTCCAAGCTGCCTCTACTCGTGACATTCCAAGATG
CCTCTGAGGTGGGAACTGTGAAGTAGGACAGAGCCCCGCAGTCCCCTCTTGTCCGTCGACTCCCATTTAAATTGGACATACCTTGTCGTTCTGAGAA
AAGCCATAGATAGGTGTAGCTGGGATGTAGTGATGGGGAGGCCCCTGGCCAACAGTGGGAGCAAGATCTTGAGTTTTGAAGACCTCAGAGTTCTGGG
CGGCCTGGGAAGCCATCTGCAGAACAGAGTTCCTTGTGGGCTCCTGTTTTCGCTAGCCCTGTTCTGCCCTGGAGCGACAGTCAGATCTCCACGCCCC
TTTCTGTTGTTCTACAGTGTCCACCTTTACTACGCGTTTTTTTTTTTTTTTTCATGATGACCTTGTAAATAGGTCAGATGTGGAGGCAGGTCTCTTC
TGGCTCCATCCACCACACCCAGAAAGAATGGGCTGCTCTGCCCTTCTCAGCCTTGCTAACCAGCAGACACCGAGGAGAGCAGCGGGGCACCTTAGAG
AGCAATCTAAACATGGTTGGCAGGTGGGGAGGGTAAAGAGTCCCACTTCCTTTGTGTTAGAAGGCAGACTACCCTGCGTCCTTTTCTCCCATTGGCT
GAAGTAACCAGAAAGACAAGAGATCCTTAACAAGCCCTTCTTCCCACTTGTAAAAGGGATAGCCTATCTCAGTTCCCAAGGATCTGGATTAGATAGA
TATTCAAAAGAGGCAAGCAGCGAATGGAGGCAGCTCCCAGCTCTGTTCCCGACGCATGATGGTACTGGCTGGGTTTAGTAAGGTGGGTGGGGCTGCA
CGGATCAATCCATCAACTCCGTCTTAAGGAGAATCAGAAAGAGGAGATAAAATGGGGGAATGGGGCAGAACAAAGAATTTGTCCTTTCCCGCTTCTG
TCTAGGGTCTGCTAATGCTGGCTTGACGAGGGGTCAGCCACTTCTTTCCTGTTGTGCAGTTGGCTTGCCAAGCAGGCTCCAGTAGGCCCTTGCCTGC
ACTCTCTACCATGTGACCATGAGCACTGCTCTAGGGACACCTCCCATCCCTTCCTAGCACCCCAAATGCCCCTTCCCATCTCTCCTTCCAGAAGTTG
GAAATCAAGTCAACTGGATAACGCTTGTGTGAGACACTTGAGCAGAACGGATACAACAATTTACAAGTCTCTTCATATCTATGTATTCTATATTAAA
AGTGATAAAGTCATGTTTCCGGGGCGTATTCAAGTAGCTGACAAGTAATTATTTAATAATAGTACATGAGCGCATTGTAATTATCCTCGCCATAGTC
AGGTAATAGCATCCAATGGGAGGTCCCTACCAACCTCCTCTATCCAAAGTTTTCTAAAAACTTCTACAAGTTGTTGATCTTTTTGATTTTATATTCA
AAAAGTCTCTTTTTATAAATATTATTTATTATACAATGTATATACCTTTGAGTTAACTAAGATTATATATTATATAAATATATATATATT
MOUSE SEQUENCE - CODING
ATGGAGCCCCACCTGCTCGGGCTGCTACTCGGCCTCCTGCTCAGTGGCACCAGGGTCCTCGCTGGCTACCCAATTTGGTGGTCCCTGGCCCTGGGCC
AGCAGTACACATCTCTGGCCTCCCAGCCTCTGCTCTGCGGCTCCATCCCAGGCCTGGTCCCCAAGCAACTGCGCTTCTGCCGCAATTACATCGAGAT
CATGCCCAGCGTAGCAGAAGGTGTGAAGCTGGGCATCCAGGAGTGCCAGCATCAGTTCCGGGGCCGCCGGTGGAACTGTACCACCATAGATGACAGC
CTGGCCATCTTTGGGCCTGTCTTGGACAAAGCCACCCGTGAATCGGCCTTCGTGCATGCCATCGCCTCGGCTGGTGTCGCCTTCGCAGTCACACGCT
CCTGCGCTGAGGGAACCTCCACCATCTGCGGCTGTGACTCACATCATAAGGGGCCACCTGGAGAAGGCTGGAAGTGGGGCGGCTGCAGCGAGGACGC
CGACTTCGGGGTGCTGGTGTCCCGGGAATTTGCGGATGCGCGGGAGAACAGGCCAGATGCCCGCTCAGCTATGAACAAGCACAACAATGAAGCAGGC
CGAACGACCATCCTGGACCACATGCACCTAAAGTGTAAATGCCACGGGTTGTCCGGCAGCTGCGAGGTGAAGACCTGCTGGTGGGCCCAGCCCGACT
TCCGTGCCATTGGCGACTTCCTCAAGGACAAGTACGACAGTGCCTCCGAGATGGTGGTGGAGAAACACCGTGAGTCCCGAGGCTGGGTGGAGACCCT
GCGGGCTAAGTACGCGCTCTTCAAGCCACCCACCGAGAGGGACCTGGTCTACTACGAGAACTCCCCCAACTTTTGTGAGCCCAACCCAGAGACGGGC
TCCTTTGGTACCAGGGACCGGACTTGCAATGTCACCTCCCACGGCATCGATGGCTGCGATCTGCTGTGCTGTGGCCGGGGCCACAACACGAGGACGG
AGAAACGGAAGGAGAAATGCCATTGCGTCTTCCACTGGTGCTGCTATGTCAGCTGCCAAGAGTGTATTCGCATCTACGATGTGCACACCTGCAAGTA
G
HUMAN SEQUENCE - GENOMIC
TGCCTGCCTTGGCCTCCCAAAGTGCTGGAAATACAGGCATGAGCCACCGTGCCCGACCTGGGCAGAACTACATTCTGGATGCATCTTAAACCTCACC
TCAACCCTACACCCTCCCTTTTGTTGTTTCCTTTCTCCCCACAAGTCATCTCAGAATGAGGCTCCCAGCTCCAGGCTCCAGTTGCAACCTCACCCCC
ACCTAGACAAACCCTCAAATCAAGAAAAAGAAGCCCTGGCAGGGCGTGGTGACTCATGCCTGTAATCCCAGCACTGTGGGAGGCTGAGGTGGATGGA
TCGCTTGAGCTCAGGAGTTCAAGACCACCCTGGCTGGGCAACATGATGGAACCCCATCTCTACCAAAAATTTTAAAAAATTAGCTTGTTGTGGTGGT
GTATGCCTGTAGTCCCAGCTCCTTGGGAAGCTGAGGTGAGAGGATCATTAGATCCTGGGAGATGGAGGTCGCACTGAGCCAAAATTGTGCTGCTGCA
CTCCAGTCTGAGTGACAGAGTGAGACGCTGTCTCAAAAAAAGAGAAAAGAAAAAGAAATCCAAAGGAAAAAAAGAGAGAGACAGAGAGAAAGGAAAA
GAGAAAAGAAAAGAAATTTCTGTTGGCCAGGCCCGGTGGCTCATACCTGTAATTCCAGCACTTTGGGATAGGCCGAGGTGGGCGGATCATGAGGTCG
GCGGATCATGAGGTCAGCGGATCGAGACCATCCTGGCTAACATGGTGAAACCCCGTCTCTACTAAAAATAAAAAAAAATCAGCTGGGCGTGGTGGTG
GGTGCCTGTAGTCCCAGCTACTTGGGAGGCTGAGGCAGGGGAATGGTGTGAACCTGGGGCGCGGAGCTTGCAGTGAGCCGAGATTGCACCACTGCAC
TCCAGCCTGGGAGACAGAGCAAGACTCTGCCTCAAAAAAAAAAAAAAGAAAGAAATTTCTGTCTCAAAAAAAGAGAAAAGAAAAGAAAAAGAAATCC
TAACACTCATCCATCCTTAAGTAAAAGCAACTCACCTTGTAAGTCAGTCTCCACATTTAATCCAACTACCCTACACTAGACATGATGGGTGAGGAGG
ATACAGATAGTTAGGAGGCCTTTGGCTACAAGTAACAGCCTCAAGTGGGCTAACGAACAAGGAAAATGTATTATTTCATATCACAAGAAGTTCCAAA
GCAGGACTCCTCTGAAGGCAGTTAGTGTCTCAGCAATGGTGTCAGAGATGAAGTTTGTTTCTCTCTCTTGGCTCTGTCTTCCTCTGCCGGTCAGCTT
CATCTTCAGGCAGCTTTCCTCATAGTCACAGAATGGCTGCTGCAGCTCCAGGTATCCCAACCCAAAACAACAATGTCCAAAAGCAGGGAAAAGATAT
TTCTTACTGTGTGTCATTTTAAGAGCCCCAAAAACTCTTCCCAGAAACCTTCTTGCACCCTTCAGCTGACCTCCCTCAGGCACATGTCACCCAGTTT
AGGCCAATCCCTGGCAAGCAGAATGGGTCCCCGTGATTGACTTAGATCAGTCAGGATTTACCTCTGAGCAAGGTAGGGGAGGAGTAAAGACCAGAAC
AAACTGGGGGCCTCTGCCATCCTGGAGGAAGGGACCACCAGCAGTGTGAGCTACACTAAATCTAAACAGAAGCCTGTCTTCCAGAAGTTCAAAAACA
GCAGCTGAGGCTGGGCATGGTGGCTCATGCCTGTAATCCCAACACTCTGGGAAGCTGAGGTGGGTGGATCATTTGAGGTCAGGAGTTCAAGACCAGC
CTGGCCAACATGGTGAAATTCTATCTCTATTAAAACTACAAAAATTATCCAGGCGTGGTAGCTTGCATCTGTAGTCCCAGCTAGGAGGACTGAGGCA
GCAGAATCATTTGAACCCAGGAGGCAGAGGTTGCAGGTTGCAGTGAGACAAGATCACTCCAGCCTGGGTGATAGAGCGAGACTTCATCTCAAAAAAA
AAAAAAAAAAAAGAGCAGCTGATTGCCACAGAGGGAGGGAGTGGATGCTCACCGATCATTTTACATGTCCCAGGTGCCATTTCAAACACAGCAGCTA
TCACTCTGCTGAATAGGCAATTGTCTTTTTGAGACAAGTGTTATTATACCCATTTTGCAGTTGATGAAGCAGGTACAGAGAGGTTAGATAATATGCT
CAGTGTCACATAGTAAGAGGCAGAGCTGGGATTCACTGGGGTTGTGGTAGACCTGGGCTCTAACGCAACCACTCAGAGAGGATTTCCCAGTCAGACA
TGTGAATCCCCATTCAGGCCTTATCTAGAAGCCAAGACAAAGGTGCATAAGAGGTGGGTCCTGCTGGGATGTGGGAAATGCCAGGCAGATGTCCCTG
CTTAGCCCAAGGGCCCTCCCACGTCTGTGCCAGCTGTGCCTAGGCCCTTGCCAGTGAGGCAGCTGTGACCCCATTCCCAGCCCACTGGGCCTCCATC
CATGTGATTAGGCTCCCAGGACTCAGGGCCCATAGCTGGCCACCCTGAGGTCCCAGCAATGACAGCTACTGGCCATACTGGTCTGTGGAGAAGGTGG
TTAGTTGGCAGAGTTCTGGAAGGTGCAAACCAGGACTTCACTAGAAATTTCTTCACCATCTCCAAGGATATTATCAGGCTTGTTCTATTCTATCTCC
CTAATGTGCCCCCACAAAAGTCTTCCCCGCAAGACCCCTGAGATGGAGAGAACTTCCACACCTCTGTTTTGTTTCGTTTTGTTTTGTTTTCTTGAGA
CAGTTTAGCTCTTGTTGCCGAGGCTGGAGTGCAGTGGCACGGTCTTGGCTCACCGCAACCTCCGCCTCCTGGATTCAAGTGATTCTCCTGCCTCAGC
CTCCCAAGTAGCTGGGATTACAGGCATGCGCCACCATGCCCAGCTAATTTTGTATTTTTAGTAGAGACAGGGTTTTGCCACATTGGCCAGGCTGGTT
TCAAACCCCTGACCTCAGGTGATCCGCCCACCTCGGCCTCCCAAAGTGCTGGGATTATAGGCATGAGCCACCATGCCTGGCCTGGTTTTGTTTTTTA
AGGAAACATTTACGTATTTGGTCCTCTGATGAATGACTGTCCCCAGCAGATGGCAAGTTCCTTGCAGGCCAAAACCTGGGCTGCTTTTGCTCATCAG
TGCTCAGCTGCCAAGGGGCAGCTGCACACAGAGTTGCTCCATGAAGATGCGTTGAAGAAATGGACCAGGTGAAATTCACAGAGCACCTACTGTGTGC
ATCAACCGGAGCTGGGTTATAAGGAAGAAGGCAGACTCCTTGAGGGTAGTCCCATTCCTCGTGGAGCCTTGTCCACAGCAGGCATGCAGTCAATGTG
TGCGATGAGAAATACAGACACTTTCCGCCCTCAGAGCCCAGGCGGAAGGTGGGGGCCCATCGTGACTAAGGTTGGAGACAGAAGAGACCAAAGATGG
CTCCAAGCCCCTCCTGGGTTGCAACCAGGGCTCCCTCCCCTTCCCTGCCTGCTTATGTCCCATACACAGGGGAGTGGAAGGAAAACTCAGGAGCTCT
AGTTCCAGGTGACTGAGAGAAACCGTGGCAGCCACACACAGAGGTCTGGCTCTAACTCCTCAGGTAGGATCACAGCCATGCTAGGAGCTGGCCTTGG
GTTAGAGCCCCAAAAGCCTTGGGCAGGCCAGCCATGTCCAGGGATGGGGCTCAGGGTTATGAGGCAATGGCAGAATAAAGGGGCACAGAGGGAGGCT
GAAGAGAAAGAAAGGGAAGGAGAAAGAGGTGTGGCACATGGCTGGAGAGGCAGCACGAGGGGCCACCAAGCCCCAGATGCCCCCATGTGGCAGTGAC
TTCCCAACAGGCTGCCCACCCTTAATCTCATCCCACTGGAGGCAGCACAGGGTCCTATGAAAGGGACACAGGAACCAAGCGACAGAGCAGGGTAGCT
GGGGTGGGTTGGAGTTGTAGGGGCCAGGGCCACTCAAGATAGGGGCACTGAGGACCCTGAGGGGCCACAGGGAGCCCAGACCTGAGTCAGTGGCCCT
TCTATCTGAGACCTCGGCCCTGCCTGCTCCCTCTCCTCTGGGCCCATCATCAACAGTGTTTTCGAGGGGCTGCTAAGTGCTGGATCCCTCACCACTG
GGGGTTCAGCAGTCTTGTGGAGGGAGTTTCTTTGTGGAGATTTCACAGTTGGAGACGGACAACATATGCAAGAAACTGAGCAGATATGTCTGCTATG
TAGTATGTATAATCAGCCGGGCATGGGGGCTTACGCCTGTAATCCCAGCACTTTGGGAGGCCAAGGCGGGCGTACCACCTGAGGTCAGGAGTTCAAG
ACCAGCCTGGCCAACATGGTGAAACACTGTCTCTACCAAAAATACAAAAATTAGCCAGGCATGGTGGCGAGCGCCTGTAATCTCAGCTACTTGGGAG
GCTGAGACAAGAGAATCACTTGAACCCAGGAGGTGGATGCTGCAGTGAGCCAAGATCACACCACTGCATGCCAGCCTGAGCGACAGAGCAAGACACC
GTCTCAAAAAAATAATAATATGTGTAATCACATATTAATCACATCAGTGTCAGGGCTATGCTGGAAAATAAAGCTGAATAAGAGGCCTGACAGGACA
GGGCTAGGGAGTGGCAAGGGGTCTGGAGGGGCCTCTCTGAAGTGGATATTTTGAAGTGGGTCTTGGAAGGGGACATCAGACAACATTATCCCGGATA
AATCCTTCTGGAGAAGGCTCCTGGGCGCCTGAAGGGGGACTGCTTAGCAGACACTGACTGGGGCAGGAAGAGAGACCTGAGAGAGAGGCTTACTCCT
TGCCTCAAGAGAAGAAGGAAACCCAATATTTTGTATTCACCATCCGCAGTCTGGCATTCCGTCAGCACCATTCTCATTTAACGCTGACAGCTCCCTA
CAAGGTGGAAAGTGTTATCTCCACTCCACAACCGAAGCCAGGGACTCAGAGATGACAGGCAACCGGCCAGTGCCCCCACCCCACCCCATTCCCTCCC
TTCTAAAGGACTTTCACCGCAAATCGCTTTCCAAAATGCTCTGGGGAGGCCAGGCATGGTGGCTTGCACCTGTAATCCCAGCACTTTGGGAGACCAA
GATGGGTGGGTCATTTGAGGTCAGGAGTTCAAGACCAGCTTGGCTAACATGGCGAAACCCTGTCTCTACCAAAAAAACACAAATTAGCTGGGTATGG
TGGTGCATGCTTGTAATCCCAGCTACTTGAGCGGCGGAGGCAGGAGAACCACTTGAATATGGGGAGGTGGAGGTTGCAGTGAGCCGAGACTGCACCA
CTGTACTCCAGCCTGGGCGACACAGTGAGACTCTGTCTTAAAAATATAGGTCAGGAGTTCGAGACCAGCCTGGCCAACACGGTGAAACCCTGTCTCT
ACTAAAAATACAAAAAATTAGTCAGGCGTGGTGGCGGGCACATGTAATCCCAGCTGCTTGGGAGGCTGAGGCAGGAGAATCGCTTGAACCTGGGAGG
CAGAGGTTGCAGTGAGTCGAGACCGCGCCATTGCACTACAGCCTGGGCAACAAGAATGAAATTCCACCTTTCTATATATATAATATATAATATATTA
TATATAAATATATATAATATATTATATATAAATATATAATATATAATATATAAATATATATAATATAATATATATAATATATAATATATAATATATG
TGTTTATTATATAATACATATTTATTATAAATACATATTTATTATAAATACATATTTATTATAAATACATATTTATTATAAATACATATATATATAA
ATACATAAAACTGAATGCCCTGGGGAGCTAGAGCTAAGACAGGAGGAACTACTGCCACAGGGAGAACCTCTCAGGTGCCCACAGCGGCCCCTGTGAT
CTCGGGATCCAGGAAGAACTGGTGACATCCGCCTGCCGCTGGCAGCCTCCCATATGTCAGCGGAAGAGGGAGGCATCCGCAGGGTGGATCTGGCGGT
GCCCCAGTGCGCCCTGGACCGGCATCACCTGGGCCCGCTCGCCCTCCGCCTGTCTGGAGAGGAGAGGGGAGCCTGAAGCCATGCACCCCTTATCCCC
AGCTAAGCTCCGGGATTGCGAGGTAGATTAAGGGCATTCACTCAGGAGGGCACCTGCTTAACCAAGATCCTCCGAAATCCGGGCTGCTCACCAGCAA
CAATTGAGGATGCCGGGCCCGCAGGGAGCGGAGTGGGACCAGGCGCGACCCCTTCCTCGCCTGCTGACCTCCCGCCTTGCTATCAGCACTGCCGCCA
GGGGGCGCGCCCGCGCCGCTGGGCTCTGAGCCGACCTCCGCGTGCACCTGCGCTCCTTTGTGTGTTAGATTAACATCTGGTGCTTACCTACTATGCG
CTTACTCGGTGCAGGTCAGGGGCTTCCTGCATTTCCAGGATGCAGCCTCTATGCCAGCAAACTAGGCTGGGCAGTGGAAAGAAATCCGATTTACTCC
TGCGCCCACCACCCACGCTAGGGCCTTCCTGCTTCCAGGCTCTGCTGTCCAGCCTTCCAGTGGCCTCTAGGGAGCTCGCCTAAAACCGCTCTGCGGT
TCCTACAGCTCCTAGGAGAAAGTTAAACGCCCTCCTCTCCAGGTCAGAGGCCTTGGAGCCCCCTATGTGCTCCCTTTGCACTGTTCCTCCATAAGCC
CTGTGGTGTTAGGCCTTCGGCCCTTCGCACTTCCCCACCTGCTTCCCCGCTGCAACGGCTTCGCCTCTCCCTTTACCCCCCCAGGTTGGTCCGGCTC
CCGACTCCCGCCTGGCAGCCCCAAGACCTGTTTCAAGCAAAAATGAATGGCACAGTGCCTGGATCGGAGATTTCCTCCTCCTTCCCCGCGACAGACG
GGTAGCCCCATGAGGGCGGGCGGGGGCCTGGCCACCGGATTCTTTGTCTACACGGTGCCTCCGCAGGGGGTCCAGTGGAGCCTCACTGAATACACAG
CGGCAGACTCTGAGCCCCGGGGGAGTGCACATCAAAAGGAACCTCCGAGCCAGCTAGAGAGAGGGGTTGGGTTGGGACTGGGGTCCCCTTCCCAGGT
CTAAGGTCCCACACATTCACACACACAACAAAAAGTGCTTCCCACGTGCCACCCCATGTCCCCAGGTCCCTGGCCCTTGCTGCCTCTTCTGCCCTCT
TCCAAGAGACCACCCTTCCTTTCAGGGCGATGGCCTCCTGGTCCACCGGCTGATGCCTCCACCCCGCCCTCCCTTCCTGGTCTTGGAGTGAATTTAA
CCCTTTCTCCACCAAGTGAAACCACCCTGGGGCTTGGGGTACCTGTTAGAGAGAGGGTGTTTCTATCTGTGATGTGTGGTCAGGGGCGCCCGCCCTC
CCCTGAGAGAAACCATTCCTGCGTTTCCACCCGCGGCAGCGCAAGGGGTGCAGGAGGAAGGAAATTAAACCTGTGTTGAAGGAAGGACACCTGGGGG
AAAGGAAGGGACTCAGGCTCCCCTTGTCTGAGGAGCTTTCAAGTGGCGGAAATCCCCACACACACCTCCATTCACTAGGGGCCTGGCAGGGCCGCTG
GTAGGTTCCAGTCCTCTCCTCTGTCACTTCCCAGGCGCACATGGCCAGCTCCTAGATTCCACCCTTCAACCCACTTGTTTCCTGCCTGATGCACATG
ACCTGCGTCTGAGTTCTCCAGGCTGCCTGGAGGAGGCATTCAGGTACACATGACCCCTCAGGGAATGATGTTCTTGCCCACAGCACCCAGGATGCTG
GCTGGGCATATCTCAGCCAACACACACTCCCACCGACAGCCTCGGATCTTTTGCTCCCACCTCACAGGGTTGGCACCTGTGGAGTCTTGAGGCCCAG
TAATGACCCCAAGAAGCCATCAAGTCCAGGCCCTGTCGCCCCACCATACTGCATCCACAGTGGTGTCTGAGTGGCCAGGGAAGGTAGCCCTCCCCAG
CTCTCAGCACCACTGTCATGGGGCTCTGGAACTCCCGAGCCCTTGGGCAGGACTCCAGCAGGCAGCTCTGATCAGAAAGCCACCTGGGAGCCCTGTG
GGTGGGACAGGACTCCAGGTAGGACCTAGCAGGCCTCCATCCAAGAGGGAGGTATGTGGAAAGCTCTCCACTGCCAGAGCCTTGGTCCTGAGGCTCT
GCATTCATGGCAATGGTAACCCTCTTTCCAGGTGAATCAGAAACAGGGCACCCCAGAATCAGCCCAGCCATGAGGAGCATCTCTAGGGATCCCCATC
TCTGCAGCCCCCACCAGGTTCACCACTCCTGGTCAGGTTCACGATTTTTCTTCGCCTTGCAGCTCCTTGGTGCTCTCCGCCTCCCCCCTGCCCCTTT
CTTCCTCACACCGGTGGCTCAGCCTCCCCCCGACAGTTTTCTTGGTTTCTGTCTCAGCGTCTCTCTCATCTCTGAGCCCCTCTCTCTCTCTCCTCCT
CTCGGATTCTCCTTTTCCTCCCCTTCCTTCCTCTCTTTCAACCTCCCCTCCCACCCCCTCCAGTCCAGCAATGGGCTGGGAACGCAGCAGGAGCCAT
GACAAGCCCAGGCGGCTCTCCCGACCCTTGGTGCCCCCGAGGCCATTTCCCCGCGCTCCCTGTGCCGGCAGCAGCCGCGTGCGGAGAGGGCTCGCCG
ACCAGAAGGGGCAGCAGGTTGGAGCTGTGGGTACGGGGGGCTCAGATCAAAGGCCAGGAATGTCTGGCCCCCTGGCGTAAGACTTCCTTCAGCCATG
GCCCTCACCTCGTGGAACGCCCGCCGTTCCAGGCCTCTGTGGGACTCGGGTCGGCTCATTCTCTGCCCTTTCTGCCACAGTTCCCTACACAGCGGTC
CCTGCTCCCCACCGGCAGTGCTTCCTTCACCCCAGACCGGGGCTGCGCAGAGTCCTGGTGCCTCAGGTGGCCTGGGAGGGGGCCTAGGGAAAGGCAC
CCAGGTGACCGGGCGTGAGTCCCCAAAACCTGACCATGATGTCAATACCACCCAGGGCTGAGACCTAATTCCTCGCTCTGGAGAGGGAGAGGAGAGG
AAGCAAGCCCGAAGGGGGCCTGGAAGGACTCCTTTCCTGTGGGGAGGGGTGGGTAACTGGAGGCATTTGGTGTCCGCACAGGGCAAGGGCCTTTATC
GCCAAACCCCAGGCTGGAGCTCCCTATCAGTAGAACCGGGGCCTCAGGCGGGACGGTCGGGCAGTGAGGGGCGCTCCGGAGGGCAGCAAGGTCTTCC
AAGGACCTGGGCCGCCCTCGGCCAGAGCTGCGCGTTTCACCGGTCCCTGATGGTCCAACCGAGAATCCCACTGAGGCTGTGGGTCACGCCTCCGACC
CGGGCCAGAGGTCGGGCCTGAACCCCTCAAGGAGGAGAAAGTGACCCGACTCCGAGAGCAGGAAATGCGACTGGCCGCTGGTGTCAGTTGCAGGAAA
TGCAAAGGCAGCAGGAGGTCCCGATACCGATCTGATCCCTGACAAAAGACTCAAATGACACTCGGCTCCGTCCCCCGGCGCCGCCCGCAGCCAGACC
TTCGAGCCTCCGCGGACTTTTCCGCACGTTCCTCGGACACCCGGGAAGTGACCTCCCGCGGCCAGGACGAGAGGCCAGAGAGCGGGCGGACTCGGGA
GGCTGGAAGCTGGGAGGGGGTGCGTTCCCCCACCCTCTGATCCTGACCTGCCCGAGCGGGGCTTCTGGAAACATCCCTGTGCTTTCTACCCTCGATT
CCTCGCGGGCCCACGTCCCAACGGGTCACGGTCCCCGCCAGCAAAGGAGCCACCCGTTCATGCCCACGCCAAGCCCTCGCCATGTGAACGCCCGGGT
CAAAGCCCCCGCGCCCTAACCCTGGCCAGCGGGGGACCGCGGCGGTAGCAGAGGGTCCGGCCCACCGCGTCCCCCCGAAGCCCCGCGGCGTCCGGGG
CGCGGGCTTTGCCCAAGTTTGCTGGGCGATGCCCTTCCCGGAGCCCGAGTTGTGGGCCGGGCGGGAGGGGCGCGTGATTGACAGGCTGAACTACAGA
CTCATCTCTTACCTTAGGCCGCGGGCGCTGATTGGCTGCTCGCTGACATCCTCAAACCCGGCTGCTCCGCGCTGGGCTCGGGAGGGGGGCGGCTGCG
GGTGGAGGTGCGCTTCTGACAAGCCCGAAAGTCATTTCCAATCTCAAGTGGACTTTGTTCCAACTATTGGGGGCGTCGCTCCCCCTCTTCATGGTCG
CGGGCAAACTTCCTCCTCGGCGCCTCTTCTAATGGAGCCCCACCTGCTCGGGCTGCTCCTCGGCCTCCTGCTCGGTGGCACCAGGGTCCTCGCTGGC
TACCCAATTTGGTGGTAAGACTCGCCTCTTGTCTGCCCGCGGCCCGGTTTCTCCGCCGCGTCCGGGGAAGGTGGGGGCGCCGGCTGGGGGTGGGCCG
CTGCAGGGCTGGGGCTCCTCTCCTCGCCTCCCTCCAGCCCCCCACCCGCCCACCCCTCCTGGATTTTCTGCTGGTGTCGCCTTCAGAATCCAACTCC
TGGCTCCTCTGATAATCACCATTTTCCCTGCTCCCCGCTGCAGGGGCTGGAGGACTTTTCCCATCTCAGAAGGTTTCTTATTCTTAGATCCTAACCC
TCTGCCCGTCCCAATCTAGAGGCCCCCGAAGACCCCCCATTTGCTTGCAGTTGGGTTTCTGGAAATCCAGCACTGTCCCTGGGGCCCAGCCACTCCT
CTTCTCCATTTTGGGGTCTTCATGGGCAAAACCATCCTGTTCCTTCACTGCCACCCCACCTCTGCCGGCGCCTCCATCAAGAGATTCCCCATAATAA
CCCCCCTTTGCCTTCCTATTTCAGACCCCAAAGGCTTCAGGGCTCCTCCCGGGGCAGGGGAGTGGGTGGGGGGATTTCATCAGATTCTCCCCACCGC
TCTAGATTCATCTTGAGCCTCTGAAGTGAATATGGTATTTGCTGATCCGGGATGCCATEGAATTCGGATTTTATTCATTTCTTGCTTGTCCACCCTG
GCAAAAGGGGGGTTCCTTGAAAATGTGTTGTCTGGGAGGGGTAGGCTTGTTGTTCTTTGACCAAAAATCCAATTCTCCATGTCACATTTCTTCCTTT
TGGAAAACCGAGGACCGAGGAGAAAGGGAGAGGGAAGGGAGAATTCCGTCCCTGAGAAATGTGGATACAAAAGACATTTTAGTAAATAAGACTGGGA
AGCCGGGAGCAGTGCTTGGGGGGGGCTGTGCGTGTCTGGGGGGCCTGGGTGAGGAATAAACATCGCTTTGGGAGCCCCAGCTCCAGGAGTCCCCTTG
TTTTCCGAGCGGCCCCATCGCCGCTCTCCCACCCTCCGCAGGTCCCAGGGGCCAGAGGGGAAGACACTGAAACCAGTTCTCTAAATTACACTCCGCC
TCTCCCCAGTCTCCAGCCCCCTACATTCCGGAAAACTTTAATTAAAGAATCTTCCCCTCCTGGACATAGGAGAGCCTTGGCCTGGGCGGGGGGAGGT
GAGGAGGAAGAATTTGGGATCTGTGAGTGAGAAGTGGGCTGTGGCCCCCGGGGTGAAAGTCAGAAAGAAGTGCCACCACGGTGCGGTACCGCCTGCA
GGTCCCCAGACTCCCTGCCTTTCGCCAACCCAGAGTCCAGGGTAGGAGGAGCAGAGACAGCGAGACTTGGGGGCCACACCCCGAGTCTTCCAGTTGT
TTGGGGATGGCAGCATTTGTGTCTGGGTGTTTGGGGCTCCTGGGAGAGAGGGTGGGGACATGGCCAAGGGTCTCTGTTTAGAGGGTGCTAGGAGTTG
CTCCCAGGACAGCCAGCCAAGGGGAAGTCTTTCTTCTGCCCAACCCACACTTTTCCGGGGGGCTGGGCTAACCTGAGGCTTCCAGCACATAAAGAAG
TCCATGGGGTGGCCAGGGCAGCCAGGGACTTCAGGAAGGAGGTTCGGCCAGTCTGGGGAAAGGCTGCTGCCAACACCAGTCCAGCCTCACCCGGCCA
TTCCTGACCCTCTTCCCATTCCCGGGCCAAGGCCATGCCGTTTTTCGCCTTGCTTTCGCAGAGACTCTGGTGGGTTGGGGGAGGGTAGGAAGGAAAG
GTTTGGCGGCCCATAGGTGGCAGGGACTGAGGAAGAGAGACCAGTCTCTCCGGCCCTATGAACTAGAAGAGGGCACTCTTCCAGTTGGTGTAGATTC
TGGTGTGAAATGGTATCTTGGGGACCATCTAGATAGGGATTGCCCAATAGGAAGAAACGCTGGGGAAACCTGGAAGGTCAAGACATTGGCCCTAACA
TAATGCTAGACACATGGCTTGTTTGGGAATTTGGTGGGGGACAGGAATGCTGCTTTGTCTAAGCCAAGGAGAGAGGTGTGTGTGTGTGTGTGTGTGT
GTGTGTGTGTGTGTGTGTGTGTGCGTGTGTTCTGGGTCTATGACCCTAAGAGGTGTTTTCTATACACCAGTGTGTCTCTGTGTGCAAAAGTGTTTGT
GCCTGCAACTGGGCTACTATGGATGTGAAATCGTGTGGGCGTGTTGGGGGATCCATGCCCACGACAGGTTGTGCTGTGTGTGTCTGCACACGAGTGT
GAGCAAGTGGCTGGTGCTGTGATGTGTGTATGTACATGTGTAAGAGACAGAGAGAAGTCTAGAAGTATCTTTGCCCATGTAAAGGTCAGAGCCTGTG
TCTGCCTGTGACGCTGGGCTTGACTGTGTTCATGACTGGGCATGTGAGTGTGTGTGTGCGTGCGTGCGTGTGTGTGAGTGTGTGTGTGCGTGCGTGT
GTGTGTGTGTGTGTGTACGTGCGCGCGCATGCCTTCATGACAGTGTGGGGAAAGCCCCACAGATGTCTTTGTGCATGAATATCAGTGCTCATGGCCA
TGACCTGATTGTGCTTGTAAGGAGGAGAGTGAGCCTCAAGTCCATAGCTGTGTGAGGGCTGTGTCTGAGTCCGCCTGTGATCCTGTCCCCAGGTGCT
GGGCCCAGGGCTGTGTGGCTGTGAATATCTTTGCAGACATCTACCTGTGGGTATGAATGACACCTGAGCTTGGGTGTTTGGTGGGCAGCCATGGGCC
TGGAGGGAAGGTCCAACAGGAAGCAAAAGTCTCACAAGGTGGCTGCAGGGGGCACAGCTGGCCAGGGATGGCAAGCTAGAGAGGCAGGGGCACAGGC
TTCCTTGACACCAGCTTGTCCTGTCTGTCCAGGCACTAGAGTCACTGGCCCTTCTCTCTGAGGTTGTTTTTCTTTGGTCTTGGAGCTGGGGTGGAGG
GTGAGTCACCTTCTCAGGGTTAGGGCTGGGGCTGTAGGGTAGATGGGCCTCTGATTCCTGATCCCATTTCTGCCCCCACTCCCCAACCCAGCCCCCC
GCCTGGCAGTCAGATTCCAGTACTTTGAGCATCTAAGCCCATCTTGGCCTGCCCTCTTTGGCCCACCCAGCTCATGCATTCCCCAGGAAGGATTTAC
AGGGGAAGTCATGTAGCTGGGATTTCTGTCCACGCGGACCCTCAAGCATGACACCCTGAGTCCACACTGCTCAGACCCCAGTCCTGACAGAAGGTTG
ACCAGAAGGGACAGCTCTAAGGGGCCTCAGACTGACACCCCTGGAAGGAAGAGATGTTCTCCAGGTAGTGACAGAGCCGGGACAGGAAACAACAGCA
CTGATTTCTCGAATTCCCCTTGTCAGTCCCAGTTAGCTCCTGGTGGAGAAACTTGTCTTTCTTCTTCTTCTTGGGGGCGCTGGGGTGGGGGGATGAA
CCTATGTTATTAGGGCCTAGCCCAGCACCTGCTACATTCCAGCGATGGACGTGCAGATGGAGGGGGCCTGCTGGAGATCAGGAGCTCACCCTGCCGC
TGTGTGACTGAGGACCAGTGGCCACCCATCTGGGTCTGCTTCCTTACACTTCACCCAGGAGTCCCCAGCCTGCCCTGCCTCACAGCTTGGGTGAAAA
TGTTTTGCAGAGGACAAGGGCAGTGAGCTGGGAAATAGCACACCTGAGTTCTCGCCATCCCAGGACCCATCCTCCCACTCGAGCACCTGCCTAAGAC
CTACCTCAGTTTCCCCATCTGTCAGATGTCCTGCTGCCTCTCCCACCCACTCCCACCTCCACCCACCTTTCAGAGGCTTGTGAACATGTTCAGTCAA
ACCCCGTGGGGGTCAGTGGGCTGGGCCCAGGGAGGCACCTGGAGACTGCGGGGGAGGAAGGCCCCAGGCCAGGTGTTAACACTTGTAACAGGCAGGA
ATTACAGCTCGCTGGGGCTGGGCTGGCTGGGGCTGGTGAGGAGCTGAGCTAGCTGGAGGCTGTTGATCCCACAGACAGACAGACAGACAGACAGATG
GGCAGATACCAGATCGGATGGCCAGGCTTTAACCGGGTGGTCTCCCTTCCAGGGCAGACCTTTCCCTGGGGGGGATATGGCGGGGAAATTAGTCCAG
GTCTCTTGGAAGTTAACAGCCCTCCCGCTCACCCCGCCCCCATTATGGGTGGGGCTTCGGAGTCCAGAGGGAGCAAAATTGGTGGCCGATCTGTTGG
TATTCTTCCGATAGGATCACATTTTGCTTAAAAAGAAGAAAACAGGTCAAACGTTATAATAATACCAAGAGCCTGAGCTGAGTTATGTCCTTAGAAG
AACCTGCTGTAATATGTATGTGGATGGCATGGGGGAAGGGGACGCTCTCAGGGAAAGTTCTAGACTCTCAGAGCATTTTGTCAACAGCTCCGGGGCC
AAGAGGTGAGAGATGGGTGGAGTCTGAGTATCACCCCCACCTCCACCCCAGGGATCCTGAGGGCTTGGGTCTGTGATGTCTGCCCTGCAATTAATCC
TGGCCTGGTGGGAAGACCTTTGGCGATGAGGTCAAAAGAGGCAGGAGCTGGACTTTGGTGCCAAGTCCTTTAGGAGGTGCTTGCTGCAGCTTCACCA
GTGGCAAACCCAGCCAGGCCCTACCAGGGCCCACACTCTGGCATCTGGATACATGCTCAGTCACTGACAAAGGTGGAGAAACTGAGGCAGACAGCGA
GGGCTCTGGGTGGAAATCTCCAAAGAATGCACTCAGCCTAGCAAGCATCTCTCATCCTCCTCACTACAGAACTTAATGCTAATAAACATTAATGGTA
CTTGGGCAGATGTAGAATTGGAAGAAGTCTCTCCTTGGTCTGGGCAGGAGACAAGGAGCCAGGGGATAAGGAGCCAGGGGATGGCACAGGAAAGGTG
ACTTATCACAGAGGAGGATGCAGCTAACAAACCCTTCCAGGGAAAAGGAAGTGGGAAAAAGGAAGATTTTTCTGGTCTCAGAATGTGATGAGCCAGG
AGTTGAGCAGAACCTTTTCCACCTACCCTGATGTGAGCCACAGAAACCTTCTCCAGCTGCCAAGGAGGGCAAGACATCCTCCACCCCTCATTCCTAA
CTCAGGGAGGAGGTATGCCTAGCCCCACCCCCACCCCCCGCCAAAGGTTAGAGCCATCCTGATATTACATCTGTACATCCATGTTATCTTGTATGCT
GGAAAATGGTGAGAGTGGGGAGATGGAGAGACCTATGTCTGAATTCCAAGTTTAATACCAATGGACCCTGTGACCTAGGATGAGTCCCTTCCCTTCT
CTGGGCTTCATTCAAGTCCCTGCCTCCTTCTGGGCTTCATTTTCCTTAACCACATGGAGGGGTCCCTTTTGCCTCTCAGAGTCCCAGGGCTATGACA
GGTTCTGGGCTCGTTGCTGTGAAGCATGACACTCTACTGCACACATTCCGGGCCTGTATTAGACAGTCCACCCGTTTCTTTCTGTGGCTCCATCTGA
CCTAAATCGCAAAGAGCTGGCTGCCCCACTCCTGCCAAGCCAACCTGCTTGCACTTCCAAACCTCGCCCCAAACACTCCCACTCTTCTGGAGCCAGG
CCATCTGCATTCACATCTGGCTTTTTCATGTACTACCTGGGTAACTAGGGCAAGTTAACCTCTGCAAGCCTCAGTTTCCTCATCTGTAAAATGAGTG
TAATGATTGCCTCTATTTCATAGGGTTTTGAAAATGATTGAGTGAATACTTCTTAGAATGATACCTTGCATACAGGAAGCATATCGATGTTAGCTAT
TTTCACCTCCTATCTGCAAGCTATTGGCTCACTGAAGCCCTGGAGCCAAACTTGCCTCTTCCAAGAAGCCCTCCCAGATTTGCCCCACCTGGCTCTG
TTTTCCCCTTTTCTTCTTTTTGCCTGTTTGCCCCACAGTGCTTTAGCTTTATTCTTAAGTTGAGGGTGCTGGGCCAGGCTAATCTCACTTCAGCTCT
TTACCTGCTCAGGAAGGGGAGGGCAGGGTAGAGAAGGTTGCTGGAGTGTCCCCTAATCATTCCCCGACCCCCAGAGTCTGCCAGACTCTTGCTGGGA
CCTAGAGCCAGGGGGCTGGGCACAGAAGGGGTGGGGGAGGCAGGCTTCCCAGGGGGAGTGGCACCAGGGCCGCCCAGAGCAGCCTGAGCAGAAGTTG
CTTCTCTAGGAGCTGAGAGATGATTCAGAAGGTGATTTATAGTCGGAAGGCAGAAAGCTTGGCTCCTGGCAGAAGCTGCTGCTTAATTACATTCTTG
GGGCGGGGGTAGGGGGGTGGAGGTATGTGTGGGGAGGCAGCAGGGGCCAGACTTCTGCCTCCTCCCCATCCAGGCCCTCCCTGTCCCTTTGGCTGTC
CCGGCTCTAAGCAGGGTCCTTCTTTATCCCGCTGCCAGAGAGGGAATTCCCTGCTCTCAGTGAGAGGCTAGGCCAGGATTGCAGGAATAGCTTCTGG
GAGTGGAGAAGGTGGGAAAAGAGGAAGGAAGCTGGATCCCATCTCCCGGGACTTCTCCAAGGGAGACTGGATGGCGACGGGCTGGAAAACGGGCCTT
CTGGGAAGGAGCACTGGGTCTCCTCCCTGCTTCTGGGCAGCGGAATAGCTAAGGCACCTGGGCAGAGTTGAGTTTCTTTCTTTCTTTCTTTTTTTCT
TGAAACAGAGCCTTGCTCTGTCGCCCAGGCTGGAGTGCAGTGGCACAATCTTGGCTCACTGCAACTTCTGCCTCCCGAGTTCAAGCAATTCTCCTGC
CTCAGCCTCCCGAGTAGCTGGGATTACAGGTGCGCACCAGGATGCCTGGCTAATATTTGAATTTTTTAGTAGAGATGGGGGTTTCACCATGTTGGCC
AGGCTGGTCTCGAACTCCCGACCTCAGGTAATCCACCCGCCTCGGCCTCCCAAAGTGCTGGGATTATAGGCGTGAGCCACCGCACCCAGCCAGAGTT
TCTAGAATCTTCTGAGAGGCAACTCCACGCTCTCCTTCGGGCACCCTGTCCTGCTGCTGCCTGGGAGGGCCTGCCTGCAGGTTTGCTCCTTTTCTGT
TGCTCAGGTCTCAGTGGGCCATGGGGGCTGGAGAGAAGGTCCTGCGCTCAGAGGCTGAAACCCGGTTCTTCAGCGTTAGGCAGCCTGTCCCTCGTGA
GCACAGTGGCTACCCCAGGTGCACAACGGTTCTGCCAGCAGGCACGGCCCCATACCCTCATGTCAAACTAATATCTCAGAGAGTCACCCCAATGCCG
CTGGGTGCAGCTACAATCACTTCCGCGCCATTGACAGGAGCCCCCATTCTGTTTCCATACCTGCTGAGTTGACATCAGCATTTCCCATATTAACACT
GACCCATGCAACAACCCGCCCGATGACACCTAAGGCCGCTTAGTTCCCTGCATCGCAGCCGTGAATCCCAAATCCCTCACTGCTAGTTCTTAAGGCT
GGAAAGGTGTAGGGCGGGCAGGGGTAGAGTTGCTGAAGCCAGTAGTGTCGATTTATCTGTTTGCAGCCTGGCCTGTACAGCCGGGAGGAGTTGGCAG
GGGTCAGGATGGGGACACTAGACAGCTCTCTGGTTCCCCCTGAGGCGGGCCTTCTCAAAATGGCCTCATTATGTGTGTGGAGTGAATTCCAGAAATG
TCAGGCACACCCATACATCTAGGGAATGAAGGAGATGCCAGAGCGGGCTCTGGGGCGAGAGGGGCCAGTGTGAGGAGGTGGGCGGCTTCCGGGCAGG
GAGTTAGGGCACCTGAGACCTGGCTCTGCCACCATCTTGATATTAGGCAACTTCCTGAACTGTTCTGAGTCTCAGTAACTAGGAGAGTTGGATAAGC
TGCTGGCCAAAGACTTCCAGCTCCGAGATTGCAGTCATGGAGGCTGTATTCCGCGTTCAGGTCACCCAGCTATTTGGACCATCTGTGCCTGGTGGAG
GGGGTGGTCACTGAAAGCTGGTCTCAGGGAAGGGTGGGGGGTGCAGAGCTCTAAACTCTACACACAAAGAGCTGTGAGACAGTGGATGAGTCTCCTC
CCTCCCTCAGTTTTCTCATCTGCAAATTGGATGATGATAATAACACGACCACCTGCCCTGCCTGCTTGCAGGGCCGTGAAGAGCTTCAGGTGGAATA
ATCTTTGTGGGCATGCCCCGTGACCAGTTGGCCTCAGACCTGAGGCCTCTGTGCCCTCTGCCAGGGGCTCTCCATTGAGCATCAGGACCCCTACAGG
AAGGAGCTGAGGACTCCTTCCTGAGGACACTTGGGAAGTGTCAGGTTCTTTCCAGAGAAGTTAACTATCACTGTGAGTCCTAGAAAAGAGGAATAAG
AAGGCTGGGCATGGGGCTTACGCCTGTAATCCCAGCACTTTGGGAGGCCGAGGCGGGTGGATCACCTGAGGTCAGGAGTTTGAGGCCTGCTTGGCCA
ACATGGTGAAACCCTGTCTCTACTAAAAATACAAAAAATTAGCTGGGCGTGGTGGTGGGAGCCTGTAATCCCAGCTACTCGGAAGGCTGAGGCAGGA
GAATCGCTTGAACCTGGGAGGCGGAGGTTGCAGTGAGCCGAGATTGCACCACTGCCTTCCAGCCTGGGCAACAAGACCAACACTCTGTCTCAAAAAA
AAAAAAAAAAAAAAGAAAGAAAGAAAAGAGGAGAGGAATAAGAGCTAGTCCCTGCTCAGACAGTGCTAAGAATGGACCTAAGAGCCCCCCTGAGCCT
CTGAGCTTGAGGAGTTGATATTTCCAGCAGAGGAAGAAGTGGGGCTGGACAGGGGAGTCCTCAGCTCCTTCCTGTAGGGGTCCTGATGCTCACTGGA
GAGCCCCTGGGAGAGGGCACAGAGGCCTCAGGTCTGAAGCCAACTGGTCACGGGGCATACCCAGGTTCACAGCTCAGGGCATGGGGCTTGGTTATCC
TCCTGGCCTAATGCAAAAACCACTGGCCAGACCCAGAGTGAGATTTCCAACCAGGGACACATGGGAAGATGTAGGTGGAGGTGAGGGGGGCGAGGGC
AAAGGGCTGCCAGCTGGAAGGGGCTCTGCTGAGGCCTGTAGTCATCAGGGAATCCTAATGGCCTGGGTAAGGCCTAGCAAACTAGGAGACAGGCACA
AGCCATTCCCTCCAGCTCGGCTGGAAAAACTGCGAGGACTGAGTGTGTGTACGTGTGTGTTGGGGAGGGGGATGGGAGCAACAGGACCAAGCACCCA
GGTCTGTCTGGAAGACCTTTCTGGGAAACCTGCCCCTGGGCACAGAGTCCCACTTATCTGCCAGAGCCAGCTGGGCCGGCAAGGAAAACCAATCTCG
CAGGGCCCATTAGGAATGCAAATAGGGCTTGTGCTGTGAGTGAGCAGGATCCCGCCTCCTCTCCAGCTCCCACCAATCATCTTCACAAGGTGGATTG
CTGAGGGTGCCACTCCCCTGCTCTGACACCTCCCATGGCTCCCCTCTTCCTATCTGGTACTGAGGCTCCCTATGATTTCACTTCTGTCCACCTGCGC
AGTTGTAACTTTCACAAAGGGGGTCGATCCCCCCAATAACCCACTTCAACTGGAATACTCACCTCTTTGCTTGTTCATTGAAATACTTCCACCTCCT
CTCTCTGACTTTAAAAGGCAGCCCAACCTGGGGCCTGTTGACCTGGGGTCAGTCTGCTCTGCGCTGCTCAGCTCGGACCCCACTTGGCTCAGGTCAT
GTAGCTAACAGCCCTGAACTATGGAGGGTCCTTAGAGGGTCTCTCAAGGTGGATGGGCCCCTCGACCTGAGCAGGCTGCTGTCCCAGGAGTGGAGAT
GAGCCTTTTCTCCACAGTGTCAATTCCCCTGGGTTTCTTTTTCTTTTTTTTTAATCCCAGTTCCACTTGTAAACGTTTCCTATTTGTGTACTATTTC
CCCCTCCATGTTCACCAGTTCACACGATGCTTAAGTGTCTTAGTCATTAATTTTAAGATTGCAATTGGCAGAAGTTGTTTCTCTATCTAGGAACAGG
TTAATACGTTTGTTGACCATGTGCTATGTGCTGATCCCCATGCAGACATCATGATTTATCTGAATCTAATTCTTGCCAGTTTATAGATAGGGAGTCC
CACAGTGCAGCCTGGGCATGGCATGGGAAGCCCTGAGCCCACACCCTGTTGGACCTAAAGCCTTTTTCCTTCTACCACCATTCAGGCTCAGTTGTGG
ACTTGTTATTGGGGTAAAAATTTGCTTGTTCATATTCTACTTTGTTCCCCAAAGGATGGTTTTGAGACAAGTTTACACTTGACCTTCCACTCAAAGG
CTGATGCTTTGGGCTTATAGATACTATTTGTGAACGTCTGGGAAGTCTCTTATTTGGGGATGTGTCCTCTTCACTGGCCACCTTTCCACAAGCCATC
AGGCTGTCCTCAAGCTGGGATTGCACAGTTGCTGACAGCAGTGGCCATGTGAGGATTTTGTTGCCCCTGGGATGGGTAAGGGGCGACCTTGATCAAA
TCACTGCCTCCCGGGCCTCAGTTTCCTCATCTGTGAAACAGAAAGGGTAGCGTAAATGACCTCTCAGATTCCTTCCAGCACTAAGCTCTTTCCTTCT
ACTTAGTCCTTTTTGCTGCTTTGCATCTGGTCTCCATCATATACGTGCTAGAAAGCAGCTGGGCAGAATCTTCTTTCTTGCCCTAGTCCAATTCTTG
TGTTGGTATCTCTGAAACAGCCAATTGTTCATTTCACTTTTACAATTCGACCTTCAGCTTTATTTCTCCCCGAGGAGCCAGCATGCTTTCTCCTTTC
TGATAAAGCATGCTTCCCTTTATGTCCTGGCTATGAGAAAACTCAGAGGTCCACCTGAAGCCACATCCTTGCACCCGTGTGGACCTTCCCTGATCCT
GCTCTTCCGTTTTTATTTTGTTATTGAATCTGATGTGTTTTCCGTCATCAGCCTCTTGAGGGCAGACATGTTGGAGTCTTTGTACCTGGCCTGGGCA
TAATGGATCCTCAATAAAGACTTGTCTTTGGGATACACATTTGCTGTCAACCTCTTCAAATCCTTTCTGGAAAGAAGCAAGGCACATGCGAATTAAA
AAGCAAAATAAACATTGCTCTGGGAGGGAGTTGGTCCTGACTGGATAGTTTTGAGTTATGAGAATTCCAGTCTGCTTCTGTTTCTTTTTTTTCTGTT
TATTTATTTACTTAGAGATGGAGTTTTGCTCTTGTTGCCCAGGCTGGAGTGCAGTAGCATGATCTCGGCTCACTGCAACCTCCGCCTCCCGGGTTCA
AGCAATTCTCCTGCCTCAGCCTCCCAAGTACCTGGGATTATAGGCATGCGCCACCACACCCAGCTAATTTTGTATTTTCAGTAGAGATAGGATTTCA
CCATGTTGGTCAGGCTGGTATCAAACTCCTGACATCAAGTGATCCACCTGCCTCGGCCTCCCAAAGTGCTGAGATGACAGGCGTAAGCCACCAGGCC
CGGCCTTCTTTCTGTTTCTTTACTGTCAGCTTTTCCCCAAGTCTACAAAGGTCTTGTCTTCAGAGAAGTCGCCTCTTTTTTTTCCTCCATGATCTTC
TCCACTCTAAAGCTGAGGTTGGTTCCTAATCTTCCTCTAGGGACTGTCTCTCGTTCCTGGCCAATGACTATGTCCACCCCTACCCCTGGCTCCCTTC
ACAACTGGTTCCTCCCACCCTCCCTTGCCTTGGAAGCCGACGGTGCTATTGCCACCATTCCACAGGTGACGGAGTGCCCAGGTAGCACCCACCCTCT
CTCCAACAGAGCTGCTCCCGTCCCCAGCAGCCATCGTGAGGGCCAAGCCCCACTCTGCAGATGGAGCCCCAAGGAGGAGCAGAGGGGAGCGGCGGCC
AGGGATCTCCCCATTCACCCAGCAAGGTGTCCTCACAACTCTAACCGGCTCTCCCCTCCCCTCCGCTTCTGCCCTTGGGCAACACATGTGCAGGTCA
CCCCACCCAGTCCCTGACTTCGGAGGAGAGAATGTCTAGCCTCAGGCTGGGTGGTTCTCCATCTTAACTGAAGCTTCCATAGGGGATTCTGGAGCCT
TTCTCTGCTACCAGTAAGGATGGAGTCTGTGACCTCTGCACTGTCCTGGAAGCTAAAGCAGCCTCGAGAAAGCAGCCTCTTCATCCCCATGTTACCT
GTGAGAAAACTGAGGCTCAGCTGGGCGCGGTGGCTCACGCCTGTAACCCCGGCACTTTGGGGGACAAAGGCAGGCAGATCACCTGAGGTTGGGAGTT
TGAGGCCAGCCTGACCAACATGGATAAACCCCAACTCTACTAAAAATACAAAATTAGCCGGGCGTGGTGGCACGTGCCTGTAATCCCAGCTACTGGG
GAGGCTGAGAAAGGAGAATCGCTTCAACCGAGGGCTGAAGTTGCGGTGAGCTGAGACCTGGCCATTGCACTCCAGCCTGGGCAATAAAAGCGAAACT
CTGTCTCAAAAAAAAAAAAAAAAAAAAGGAAAAGAAAAAGAAAAAAGAAAAAAAGAAAACCGAGGATCACAGGACCCAACCAGGAGCTGTAAGGAGC
TCGGAAGCAAGTGGGCGGCTCCAGTGGCAGCTAGTAATTCCTCGCTTATGATGTCCCGGGTATCACATACATTGAGGAAACAAAGCACACACATTAG
CTCATCCTCCCGACAACCCCAGGAGGCAGAGACTCTTGTTATCCCCATTCTACAGATGAGAAACTGAGGCCCTGAGGCACCATTCCATTGCCGAAGG
CTCCATGGTTGGTAAACCCCAGAGCTCTAAACAAGAGACAAACTGCCTGAAGCCAGGCCCTTCAGTGACACCACACCACACCACAGCCAGGAAGTTC
CTCCTTAGATCTGACTTCAGTCTTTCCTTAATCCAGGCCCAGGTTTTCTTCCTGGGGATGTGAATATCACTGTCAAGTTTCAGTTTGGTTTGGTTTG
AGACAGGATCTTGCTCTGTTGCCCAGGCTGGAGTGCAGTGGTACAATCACAGCCCACTGTAGCCTCAATCTCCTGGGGTGAAGCTATCCTCCTGCCT
TAGATTGCCAAATCACTAAGACTACAGGCAAGCACCATATGTGGCTAATTTTTTTAATTTTTATTTTTATTTATTTTTGAGACAGAGTTTTCACTCT
TGTCACCCAGGCTGCAGTGCAATTGCAAGATCTTGGCTCACTGCAACCTCCACCTCCCCGGTTCAAGCGATTCTCCTGCCTCAGCCTCTCACGTAGC
TGGGATTATAGGCGCCCGCCACCACACCTGGCTAATTTTTGTATTTTTAGTAGAGATGGGATTTCACCATGTTGGCCAGGCTGGTCTCAAACTCCTG
ACCTCAGGTGACCCGCCCACCTCAACCTCCCAAAATGCTGGGATTACAGGCGTGAGCCACTGTGCCCAGCCTTTTTTCTTTTTTTTTGTAGAGATAG
CATCTCCCTACATTACTCTTGCTTGAACTGGACTCAAACAATCCTCCTGCCTCAGCCTCTCAAAGTGCTGGGATTCCAGGGGTAGGGTTCCAGTTTG
CACTTGAGGACCAGGGTTCGTCTCATCCCTGAATCTTCCTGTGTCTGGAGTTGGTTCCTTCCAGTGGGTTCGTGGTCTCACTGACTTCAAGAATGAA
GCCACGTACCTTTGCGGTGAGTGTTACAGGTCTTAAGGACCCCAAGAGTGAGCAACAGCAAGAGTTATCCTGAAGAGCAAAAGAACAAAGTTTCCAC
AGCATGGAAGGCGACCCAAGGGGGTTGGTGCTGCTGGCTTGGGGGTGGGGGGGTGGGCGGGGAGGCAGCTTTTATTCCCTCATTTGTCCCAGCCCAT
GTCCTGCTGATTGGTCCATTTTACAGAGTGCTGATTGGTCCATTTTACAAACCTCTAGCTAGCTACAGAGCACTGATTGGTGCATTCTTACAGAGCA
CTGATTGGTGCATTTTACAAACCTCTTGTAAGACAGAAAAGTTCTCCAAGTCCCCAGTTGACCCAGGAAGTCCGGCTGGCCTCATCTCTCATTCCTT
CTCTAGAACAATTCCTCCCAGGTGACCCATCCTCTACTCACCTTTAACTACTTGTTCTTCCTCTTCTGATCTCTTACCAGCTTTTCTACAACTTCCT
GCAAGTCCTATAGCCACAGAATTGCCTTTAAATCAGGGAAAGAGGGGGCCTGCCATCAGCTCTCTGATTTAGAGGCTTCCGTCTGGTGTCTTACAGC
ACTTCCCTTCCCCATAGGGCAGGGAGTCTGGAATCCAGCATGCCTGCCCTCAAGAGGCTTATGACGGAAAACACATCAGATTAAATAACAAAATAAA
AACAGGCTAGTTGTGGTGGCTTGCGCCTGTAGTCCCAGCACTTTGGGAGGCCGAGGCAGGCAGATCACTTGAGGTCAGGAGTTCGAACCAGCCTGGC
CAACATGCTGAAACCCCGTCTCTACTAAAAATACAAAAATTAGCCGGGTGTGGTGGCACGCACCTGTAGTCCCAGCTGCTGGGGAGGCTGAGGCAGG
AGAATCGCTTGAACCCAGGAGGTGGTGGTTGCAGTGAGCCAAGATCACACCACTGCACTCCAGCCTGGGCAACAGAGTGAGACTCTGTCTCAAAAAA
TAAAAATAAATAACAAAAACAGAAGAGCAGGATCAAGGTCAAGGAGAAGACAAATATGCAAGTCAAGGTCAATGCAGGTGCAAGGATGGAGCTTGCC
CTGAGTTTCCTCACAGCCAGGACATAAGGGAAAACACGCTTTACCTGAAAGGAGAAGGCATGCTGGGTCCTCAGGGAGAAATGCCCGCCTACAGCCT
GTGCCCACCCTCTTCAGCTGCGCCATGAGAATTTAGGCTCCTGGAGTATCTGGCCCAGACAGCCGTGAGCCTGCTTCCGGGCTCTGCAGGCCTCTGC
CTGGGGCCCATTCTGCCAGGGCAGGCCACACTGCCTGTGGCCAAGGGCTGGTCAAGGGAAATTCATTTGCAAGGGCTGTGGCTGGAGCTTGAGGGTG
TGGCTGGGGCCTCCAGCATGGGATGCAGAAGGGATGGGCAGGCTGCAGGCCTGGGGCTAGATCTCCCATGTCACCATTGTCTAGCGTGAACTTTATC
AGGTAACCTAGCCCTCTAGGTGGCAAGTAAGGTTTTTGCCAAGATAGGAGGATAGAATGATTGTTTAACTTTTTTTTTTCTTTCTTGAGACATAGTC
TTGCACTGTTGCCCAGGTTGGATTGCAGTGACACGATCTCACTATAACCTCTGCCTCCCAGGTTCAAGCGATTCTCCTCCCTGAGCCTTGCGAGTAG
CTGGGATCATAGGTGTGCACCGCCACACCTGGCTAAGTTTTGTATTTTTAGTAGAGACAAGGTTTTGCCATGTTGGCAAGGCTGGTCTCAAACTCCT
GAGCTCAGGTGATCTGCCTGTCTGGGCCTCCGAAAGTGCTGGGATTACAGGTGTGAGCCGCTACGCCTGGCCAAGTGATTAACTTTTTAATGAAAGT
ACAGGAAAAGACGTAAACTGTCTTTCCTCTGCTTTCACCCTGCAATAATTGGTACAGAAGACTTCTGTGACCAAATGCGTGCATACACCAAGCAAGC
TGTCAATTCTGCGGCAGACATCAGCCAGCGTCCTCTAATCCAATTCAATTCTGATGATCTCCACCTGGACATAGCATCTGATCCCATAGGTTGAGGT
CTTAGTTCCCAGGACAGCCTCCCACTTCCAGTAGCAATCCCAAGCCCCAGGCTGCTTTACATGTGCTCCTGACTGACCTGCTATAAATCAGGGTTCC
TGTGACTTCCTCCTTGGGTTCCATTAATTTGCTAGAGTGGCTCGCAGAACACAGGAACACACGTTTACTGGTTTATTATAAAGGATATTACAAGGAT
ACAGATGAAGAGGTGCATAGGGCGAGGTATGGGAGAAGCTGCACTGAGCTTCCACGCCCTTCCCAGGCACACCACCTTCCAGGAACCTCCACGTGTT
CCGCTATCCGGAAGCACTTGAACCCTGTCCTTTTGGGCTTGTATGGGGGCTTCATTCCATAGGTATCATTGATTAAACCATTGGCCACTAGTGATCA
ACTTAATCTTCAGCCCCCTCTCCCCTTCCCAAAGGATGGGGTTGGGGTTAGGGTTGGGAGTCCAACCCTCTAATCTTGGCCGGGCACGGTGGCTCAC
ACCTGTAATCCCAGCACTTTGGGAGGCCGAGGCAGGTGGATCATCTGAGGTCAGGAGTTCGAGACCAGCCTGACCAACATGGTGAAACCCCATCTCT
ACTAAAAATACAAAAAAATTAGCCGAGCATGGTGGCAGGTGCCTGTAATCCCAGTTACTGGGGAGGCTGAGGCAGGAGAATCGCTTGAACCCAGGAG
GCGGAGGTTGCAGTGAGCTGAGATCACAACACTGCACTCCAGCCAGGGAGACAGAGTCAAACTCCGTCAAAATAAATAAATAAAAGAAAAGAAAGTC
CAACCCTTTAATCCTGCCTGGGTCTTTTGGGGTAACCAACCTCAATCTTGAAGCTGCCTAGGGGCTGCCAGCTCTTCCGTCAGCTCATTAGCATACA
AAAAGACATCACTTTGGAGTTTCTAAGGATTTTAGGAGTTGTACGCTGGGAAACTAGGTCGAAGACCAAATATATATTTTATAATATCACAAACATG
CGTACAGGCGAGCACACAACTTGTCAGTGTACAGCTTAATGAGCTGGATAGAATATCTTATGTTTAACAGTTTGTGAACCTGGCATGAAACTTTTCA
ATACTGGGCACATGGTAGATGAGGCTTCGTTGAGTGGTCTCAATGCTACAGCCAGGCCTTAGGGCTTGGCGGGGAAACAGTTCCACTAGGGTCGAAC
TGGCACAGCATCGGGAAGAAGGCTTGCCTCCTCTAATGTGGCTGCATCATCTCCATCCCTCCCTTGGCAGACCCACAGTGGCACTGCCCTCCCTCAC
AGCTGTGGTCACTTACCTCCAAGTCCCTTTTTGTTAAACTTGGACCATGTTTTAGCCTTTCTCAGCCTCAACGGATCTTCTTTTCTGATCAGTTTAG
TCAGTCTTATTTTAATTTAATTTAATTTAATTCAATTCAATTCAATTTGTTTTTCAAGATAGAGTCTCGCTCTGTTGCCCAGAGTGGAGTGTAATGG
CGCAATCACAGCTCACTGCAGCCTCCGCCTCCCAGGTTCAAGCTATTCTCCTGCCCCAGCCTCCCAAGTTGCTGGGATTACAGGCGCCTGCCACCAT
GCTCGGCTAATTTTTCTATTTTTAGTAGAGATGGGGTTTCACCATGTTGGCCAGGCTGGTCTCCAGCTCCTGACCTCAGGTGATGTGCCCACCTCAG
CCTCCCAAAGTGCTGGGATTACAGGCGTGAGCCACCGTGCCCGGCCACTTTGGTCATTTTTAAACGGTCTAATTAGGAGTGCAGCAGCAGCAGATAT
GACTGTGTTGTTGTATACTCCTCAGCCTGGCCCCTGCCGCCCTGCACCCGCTCCTCTCCCAACCCCAACATGGGTAAGCACATGGGCCTGGGTACAG
CAGTCCTGGACTCTAGATGGTTCTGCCTTTTTATCTGGGTGGACTTCACCTCTCCAAGCCTTGGTTTTCTCTCTGCAAAATGGGGATAACGAGGGCT
ATTGTGAGGATGAAAGGATATAACGCATGTGAGACTAGCACAGGGTCAGGTGTGTACTCAGTGAGTTAGACACACATTTTGCTGACATTAATTTCAT
GTTACAGTCTGCGTTGTTCTCGTGCACACCTCACTTCTCCGTGCCTCTGTGCTACCCCCTGCCTTCTCTTGGGATGACTACAAACTCCTGTTCGGTC
TTGAAATCATAGTTCAGCCATCACTTCCTCTGCGCAGCCTTCCCTCAGCACCGCGGCCCCAGCAAAGGCCCTTCTGAGCACATCTATTTCATGGACT
AGACTGTAAGTCACCTGTGGGCAGGACCAGTTCTCCATCATCTTTCAACCCATACCACCAAACATAGCACAGGGCACACAGTGGATCCTCAAAGACA
GGTTGTGGGATGAAAGGACACTGTTGAGAGTCACCTGCTGGTCCCAGACTCTTGTCTCCCTGCTCCAGCTGGATTCTCATTGCCTCTGTGATGCTCT
GCCAGGAAGACCAGCTGGTACTTGTTGTGTATTTTCCTGTATTCTCAGATACCTCTTCATGTGCATCTGTCTTGTCTTCCCAGTGTAAGAGTCAGCC
CCTGAGGGCAGGGATTCTGCTCTGTAGGCCTCTGCATCACTAGCGAGCCTCACACATCATCCTGAGTGTTGCAGGAGCACAGTTAGGAATTCTGTTA
TCAGGCCAGGCATGGTGGCTCACATCTGTAATCCCAGCACTTTGGGAGGCCGAGGTGGGCGGATCACCTGAGGTCAGGAGTTCTAGACCAGCCTGAC
CAACACGGTGAAACCCCGTCTCTACTAAAAATACAAAAATTAGCTGGGTGTGGTGGTGGGCAGCTGTAATGCCAGCTACTCGGGAGGCTAAGGCAGG
AGAATCACTTGAACCTGGGAGGTGGAGGCTGCAGTGAGCCGAGATCGCGCCACTGCACTCCAGCCTGGGTGACACAGTGAGACTCCATCTCCAATAA
ATAAATAAATAAATAGGAATTCTGTTAGCACTTGGCCCAGGAATCAGACTCCTTCCCAAGCAGGCTGCAGTTCAGGCTCAGCTGGTCCCCACTCTCT
GGGACAGCACTCCCCTCACTCTGTGATCTCCCAGGAAGTCCGGCTCTGGGCATCTAACCTTGGTGTGGGGAGGCAACATAGCACTCCAGAAAGAGGG
TAGGCTCTGTGACAGAACCACCTGTGGTGCAAATCCCAGATGTCCACTTCATAGCTTCTAGAACTTTGCTTTGGGTGGTTGCTTAAAAATCTGAGTC
TCAGTCTCTTCCTCTGTATAATGGGAATAAAAAATATGATCTCAAGGTAGTTGTGAGGTTGAAATGAAATAACAGACAGAAACTGGCTAGGCGCAGT
GGCTCATGCCTGTAATCCCTACATTTTGGGAGGCCAAGGCGGACAGATCATTTGAGGTCAGGAGTTCGAGACCAGCCTGGCCAACATGGTGAAACTC
TGTCTCTACTAAAAATACAAAAAGTAGCCAGGCATGGTGGCGCACACCTGTAATCCCAGCTACTCAGGAGGCTGAGATGGGAGAATCGCTTGAACCT
GGGAGGCGGAGGTTGCAGTTAGCTGAGATGACACCACTGCACTCCAGCCTGGGCAACAGAGTGAGACTCCATCTCGAAAAAAAAAAAAAAAAAGTAG
AAATAATAGAAACTGAGTTGAAGGTGAATCATTAAAGATGTTCTACAGGTCATCTAATGTAGCAGGGTTATAAAAATATTCTCTCCCAGGCCAGGCT
TCTTTAGAGCAGAAAGATCTGAATTCCTTCCAAAACAGAAAAGGCTGGCTTCAGGGAATCCCACACACTTTATGTTGGTTTGTCCCAACCAATAAGC
CTATCTGAAGAAAGAAGCGGGTGGGGAGGCATGTGGCAGAAGTCTGTGACTTGGTGGACAAAAGGCAATGCAGACTCTGGCATGACCTTGCGTTCTG
GTATCCTGTTCAGCCAGAGTACTCACAAAGGCCTCCAGTTCTCAGGAAGGGAAGGGTGAATTAAATGTGGTTAGCTATCAGGGATTTTTTTTTTTTT
TTTTTTTTGAGACGGAGTCTTGCTCTGTCACCAGGCTGGAGTACAGTGGTGTGATCTTGGCTCACTGTAACCTCCGCCTCACAGGCTCAAGTGATTC
TCCTGCCTCAGCCTCCTAAGTAGCTGGGACTACAGGCACGCACCACCATGCCTGGCCAATTTTTTGTATTTTTAGTAGAGATGGGGTTTCCCATGTT
AGCCAGGATGGTCTCGATCTCCTGACCTCGTGATCCACCCGCCTTGGCCTCCCAAAGTGCTGGGATTACAGGTGTGAGCCACTGCGCCCAGCCTATC
AGGGATTTTTATGGGGGTTCCAAGGAGTGGTCTGTGTAGATTTAATATCACCCTAGTTAATGGCTGAGGCACTGGCTGTGTAAGCCCTTGCTAAGCA
CAGTGAGTGAGTGTGGCTGGAAGTGCAGGAGGCCTGGGTGGGATGCAGGCTGATCCAGGGCTGGCAGTCACTGTGTGCATCCAACCTTTAGGCGAGA
GAGGGCTGCTAAACTCTGAGAAGGAATTCAGGGTGAAGAAGAGCTGATGTGCCAATGGTATGGCTGGCACAAGCCTAAGCAGATACCAGCTATTCTC
CTGCAAGCTGATCAAAAATATTTTTATTACATAATACTTGACATATACAAGAGAACAATCATATATATTAGACATGATGACAGAATGAAAACCTGAG
CCTCACTATGTCCCTGAAGGACCAGACCGTGACTAGGCCGTCGTGTCCATCTGTGGGTCCTCCTCAGCCCATTCCCCATCTCCCTCTAGATGTGACC
ACATCCTGAATTTTACCTATTTATTCCATTACTTAAAAATACTGGTTTTTGGCTGGGCACAGTGGCTCATGCCTGTGATCCCAGCACTTCGGGAGGC
CGAGGCGGGAGGATCACCTGAGGTCAGGGGTTCGAGACCAGCCTGGCCAACATGGTGAAGCCCCATCTCTACTAAAAATACAAAAATTAGCTGGGTG
TGTTAGCACACGCCTGTGGTCCTAGCTACTCGGGAGGCTGAGGCAGGAGAATCGCTTGAATCCAGGAGGCAGACGTTGCAGAGAGCCGGGATCACGC
CACTGCACTCCAGCCTGGAGACCCTGTCTCAAAAAAACAAAAAACCAACAAACAAAAAACTGGTTTTCCCAGGTAATAATGCCTAAATGAAATGTTT
TATTTTGCCTATTTTTAGCATTATAAAAATGGTGTTATACTGCATGTGGCCCTCTATGTTGAGCTATTCTCTCTCTGCATTGTGTTTCTAAGTTTCA
AACTGTTCCTGGATCTTGCTGTAGTTCTCACATGCTCACAGTTGCATAATAGTCCATCTTTAGAATATACAGTTTATCTATTTTGTCTCCTGGCCAT
GGATGTGCATCTCGCTGTGCACAGCAGGGAAAGGTGTTCATGGAGGTACCTGCCTAGGCGTGGAACTTTGGGTTGCAGGATGTGTGAATGTTGAGCT
TTACAAGATGATGCCAAACTGTTTTCCAAAGAGGTTGTGCCCATCTGTGCTGTCATCTTTGAGATTGTTTTTCCCATGGCCCAAGGCCCTTCTTCCC
GCCCGAGGCAAGCCCACTCCTGAGGACTCCACTGCCTTGGGCCTTCACCGTCTTTCTCTCAGGATCCCATTCCCTACTGGAAAACTCTTTCCTTTCC
CTCCTCCACTTGGCCCTGAACTTCCCAGGATTTTTCAAAACCCAGCCTGGAGCTGCCGTCTTCCTGGGAGTCCTCTCAGCCTCACTTCCACTCTCTC
CCACCTTTTTGGAACAGCTTTTCCAGACAGCTCTTGGGCCAGAGTAGGACATCGCATAGTGTGTTTCTTATAACATCAGCCCCACATAATCCTGTTG
AGAAAGGCTTCTGGAGTCAAATAAACTTAAGAATCGCCACAGGCAACTTGGAGCCTCTTGGTGTTTATTGTTCTCATTTGAATATTAGCAGCTCATT
AGCATAGTTGCAGCACTGAGAGGTCCTGCCAGTGTGACCCGTTTTTATTTGTTTAACTTGTTTTCCAAAAATATTTAACCTTGGAGCCCTTTTCCCA
GTCCTCTGACTTCTGTTGTAATCATCCCGTGTAAACTAGTTCAGTCCAGACCACCCTTTCTGGAGGGCTTGAGTGGAAGGAATGAATGAATGCACTC
AGGAATTAATGAATGAAGCAGTCAGCCAATCAGTCAGCCATCCAGCTGAGCCCCCTCTCCTATGCAGCAGCCAGGAACCAGGGACTGATCAGGCACC
GCTCATCTTGCACCAGGGGACACCCGGGCTGTCTGGCTGGTGAATCATTCTCCCGTCTTAGGTCCCCTGTAGTTGCATTTTTAGGATCTGTCACCCA
ATGAGGCTGGGAGCCCCTGCGGGGCAGGAACCAAGTTGCGCTTGCCTCTCTGTGTGCCCCGAGTGGGACATACAGATGGGATCTCTCATCCAACTCC
TTCTGAGAGGGGCAGGAGAACATTGTGGTTAAGTCTTCAGCCTCTGGAGCCAGACCAGATGTGTCCCTAATTACCTGGGTAATGTGGGCCAATCTCT
GCCTCAGTTTCCCCACTGAGATAGGGGTGATGATAACATACCTTCCTTACAGAATTATTATGGGGTTAATATGCGGCAAGCACACAAACAGTGCCTG
GCATAGAGGATGTCACTGGTCTTTATTAGCACTATGACAATGGCAACCAACATTTATTGTGCACCTACTATGTGCCAGGGACTGTGATAAAAGCTTT
ATCTACATCATTTCAATTCTTCCTCCCCGCAGCCTCTTTGAAGTGGGGGATGTTTTTCTCATTAGGAAGTTGAGTCCTCCCAAGGAGACGTGGTAAT
GGGTGGTAGCAATAAGATCAGGATTGGGGTCAGCCAGATCACAAAGCCCTGGCCTGCAGGCGTGGAGGGTGCCACCTACCACCTGCGGATGGGACAG
CTCCTCTGTTTCTTTTTACTGATAATTACCCTGCCGACAACCTGATCAGTTCTTTTTTTTTTAATCCTCTATTCATCTCAACAAAATGGAAATCCAT
GGTACTGCAAGGGTTAGAATTTAACATGTGTGCACACGTGTGTGTGCGTGCATGCATGTGTGTGTGTGTGAGAGAGAGAGGGAGAGACAGAGACAGA
GAGAGACAGAGAGCAAGAGTGCACAAGTGAAGGAGAAGGAGTTATCTGAGAAGCCTGGGGGTTACTAGCACCTTCATGACAGACCAAGGAAGACAGA
GATCCCCGGGTGGGGCTGGCTTTGAGACTGCACAGCGGCAGAATCGCTTGTGAGTCAGCAGTGCCGCAGAACAGCAGGGTGCTCCGGAACTGGGCTT
GGTGTCGTCACCCACTGCCCCTTGCACAGGGCCCTGTGTGCCGGGAAATGTTTGCAGGCTGGACACCTGTGGTTGCTTTTAACCAGGCAAGTGAGCT
GGGTTAGAGGTAGCCACATGTTCCTGAGGGCTCGCAGCTTTGGATCTGAGAGGGTTAGACAGGGCGTCAGGGGCTGAGGGTCACTGGAGGAGAATTT
GCTGTCGTCCCTTTGCCCACGGGCCGGCTGGTCTTCTCAGACCCCAGAGGCCAGCTCCTCTGTTCTTCCCCACCTCGGAGGGGAGCCCCAGAAGTCA
CAGGGTCAGCTGTCTGCTTTCCACACTGCCTAGGGCTTTATTCTTGCACCATCCCCAGTTCTGGCCACACCAGGGGAGTGAGACATGGGGCGCCGGT
AGAGGGGCTGAATGCGCTGGTGTGGGGTAGGAGGTTTCGGATGCACATTCCAGAGGGTGTTTATGGGGGAGCAGACAAGCCTGGGGATTCATTCCTG
GTAGGGAACAATTCCCTCAGCACCCGAGGGTGGGAAATGAGGGCCAAAATGGTGGCTCAGAGGGACACAGGTGAGGTAAGCAGGTAAGAATTCCCAC
CAGGTGTCTCAGAAATGTCCTGGGAAGGGCCTGGCATGGTGGCTCACACCTGTAATCCCAGTATTTTGGGAGGCCGAGGCGGGCAGATCACCTGTGG
TCAGGAGTTCAAGACCAGCCTGGCCAACATGGTGAAACCCCGTCTCTACTAAAAATACAAAAATTAGCCAAGCATGGTGGTGGGTGCCTATAATTCC
AGCTACTCGGAAGGCTGAGGCACGAGAATCACTTGAACCTGGGAGGTGCAGGTTGCAGTGAGCTGGAATCGTACCTCTGCACTCCAGCCTGAGTGAC
AGAGCAAGAATCTGTTAAAAAAAAAAAAAAAAAAGAAAAAGAAAGAAAGAAAGAAAAGAAAGTCCTGGGAAGCTGGTGGAAGGAGGTCGAGATCTTC
CTGACCTGGGAAAGGAGGGAATTCCCAGGCATCTATAGACCAATAGGACTGTCGAAAGTTTGACTGGTGTGAGAATGGGTTAAGGTGCTGAATTTTA
GATTTTTATCCTCTCCACGGTGGTACAGTGTGTTCTGCAAACAAAGGAGAGCCAGCCTTGAAGAGCCCTTCTCAGAGCTGACTATGTTCTTTGGCTC
CTCAGCCCAGTGAGATGGCCTTAGCTCTGAGCCCTGTGCAATATGCAAACTGGACCAGATGACCCCCAAGGCTCCTTCTAGCTCTGACAGGTCCTGT
CGGGGGATCCAGCCTGCATATAGGGCCTGGGCTTCTTTCAGCCCCATAGATGGTGACCCCTCTTCACCGCTAGTAAGATTGAAGCTCATCAGCAGGA
CCTCAGGCCCTGGCCTCCTTTCTTCTTGGTCCCTTGGGTTTTGGAGTTTTATGTGACATCAATGTCCCAGAAATGCCCATCCTCTTCCTTTTCTCTC
AGGGCACAGTCCCCTGAGGTCTTGTGGTTTATCCACCCCCACCCCTGTTCTATGTCCTCCTTCACTTGCTCTCCCCCACGCCCCTCCCACCAGAGAG
TTTATAAGCTGGCTGTCCCCTTGCTAACCTCCTGCTGTTCCCTATGAACATGCCTGTTAGATTTCACCGTGTGACACTGTCTTGGTTATGTCCCCGT
CGTGCCTAGTTCAGTGAAGAACACATAGCAGGTGCCGAATAAATGCACTCTGCTGGGATAAACTGGTTATCTCCAGAGGGTGGGGTCTGGACAGAGT
GGCAAAATAGCGATAGCATGGGATTTGGGGTCCAACTCCACCTCCACTTCCTGGCCGATGGCAATCTGTCATTGGTAAACTGGAGCCGGCATCTCTA
CTCTCAGGGCTGTTGAGAGGATTCATGGAGAAGCTGTGTGAGGAAATGCTTTGCAGGTTGGAAGGTGCTGGGAACGTGTGTCATCTACCCTGGCCTC
TCTCTCAGGAACTCTTGCCCACATTTGTCAGCATCTGCTGGGTGTGTTGTCTTGGGAGAGGTCTTGTTAACCCTCTGCCACCTTGAATTCTCTGGTC
CCCTGAAATTCTTTGTCCTGTCTCACACACAAATGCCTCCAGCCCTCAGGTCGGGGGTCTCCTCTCCTCCTGCAATGCCTTGGGCGTGGGTCCAGCC
TTGTCTGAGACACAGAGAAATGGACCTCCAGTGCGGAAGATCTGCACCAACATTCGAAAGAAAAAAGACTGATAGGCGGGAGCCCAGCATTTGAATT
TACAGGGATGTTAACCCCAACAGCGGCCGGAGCAGCAGAGCAGGACCTGAGCACTTCCTTCCCTTTCTCCTTAGCCTTCCATGAACATGCTCTCTAT
AAACCCTGTCCTGGTAAATGTCTCCCCTCATTTTTTTTTTTTTTTTTTTTTTTTTTTTAGACAGGGTCTCACTCTGTTGCCCAGGCTAGAGTAAAAT
GGCTCGATCTTGGCTCACTGCAGCCTTGACCTCCTGGGCTCAAGCAATCCTCCCAACTCAGCCTCTCAAGTAGCTGGGACTACAGGTGGTCACCACC
CCCGCCTCGGCCTTTCAAAGTGCCGGGTTTACAGGTGTGAGCCACCTCCCTCAGCCCTCACTGCTTTTTTTGCCATCTCAGTGCCACCATTTCCTAG
CTATGTGACTTTAGACGAGTCACTTGGCCTCTCTGAGCCCATGTCATCATCCGTTAAATTGGGTTCTTTGGCAAATTTAAGGATGTATTCTATGTAA
AGTGCTTTACATGGCAACTGGCACATAGTCAGGCCTCAATAAATGTTAACTATTATTATTAATAATGGCCACTGGCCAGGCGTGATGGCTCACACCT
GTAGTCCCAGCGCTTTGGGAGGCAGAGGTGGGCAGATCACGTGGTCAGTAGTTCGAGGCTAGCCTGGTCAACATAGTGAAACTCTGTCTCTACTAAA
AATACAAAAATTAGCCAGGTGTGGTGGCATGCACCTATAGTCCCAGCTACTCGGGAGGCTGAGGCAGGAGAATCGCTTGAACCTGGGAGGCAGAGGT
TGCAGTAAACCAACACGGCACCATTGCACTCCAGCCTGGGTGACAGAGCAAGACTCTGTCTCAAAAAAATAATAAAATGGCCACTCTGAGTGCCTCA
GTGAATAGGCTCCTTACTACCTTACTTAGAGCAGAGTTGAGGAAATTGGTGAAGTTCTTCACTACCTTATTAGCCACTCTCTACCCAAATAAATGTA
CCCCACCTTATCTTATTCATTATGGGTAATCACCTGTAAAAGCGTTCTTTATTTCATTCACAGCCTGAGTGTCCCCAAAAAGGTGCTCCATGACGTC
ATCCCCCCTCTGGAGGACACCTCCTCCCACCCATGGTGATTTGAGCCTTCTCTTAGGCCAGGGTGATTCCTGGGGGAACCTTAACTGGGGCTAATGT
GCACTGACATTTTGCCTTTTGTGTCGAACACACATCCCATTTGCAGAGATTTAGAATTTTTTGACTTTAAATGTTCGCTATTTCTATGTATGTGTAA
GAGAGAGTTGTTTTCTTTTGTTTTGTTAAGAGACAGGATCTCACTCTGTTGCCCAGGCTGGAGTGCAGTGGTGCAATCACAGCTTACTACAGCCTCA
AACTCCTGGGCTCTAGCGATCCTCCTGCCTCAGTCTCCCCAGTAGCTGGGACTACAAGTGTGCACCACCACACCCAGCTAATTTTTCTGTGTTTTGT
AGAGACAGCGTCTCGCTGTGTTGCCCAGGCTGATCTCAAATTCCTGGCCTCAGGTGATCCCCCTGCCTCGAAATTCTGAAGTGCTGTGATTATAGGC
ATGCGCCACCATGCCAGAGAGAGAGATTTTATCTTTTCTACACAACGTGTGTTTCCCCCAGAAGAAATGCCTTCCTACTTCTGTGATGAATGTAAGT
AGAATGCAGACAGAAATTACAGAAACTCCCTGTGCCCCAGCACCCTTACCAGGGCATGCCTGGCCTGGTGGAGTGACAGGGTGTTGTACACAGTGAG
GGGAAGGAAGGGAGTGGGAGAGGAGGTGAGGCTCTGCAGAGCAGAGTGGACCATTTCTGGTCAGAAAACAGTGAGGAGGCCGGGCGTGGTGGCTCAC
GTCTGTAATCCCAGCACTTTGGGAGGCTGAGGCGGGCGGATCACTTGAGGTCAGGAGTTTGAGACCAGCCTGGCCAACATGTTGAAACCCCGTCTCT
ACTAAAAATACAAAAAAATTTAGCCAGGTATGGTGGTCCTCGTCTGTAATCCCAGTTACTCAGGAGGAGAATCGCTTGAACCTGGAAGACGGAGGTT
GCAGTGAGCTGAGATCACGCCACTGCACTACAGCCTGGGTGACAGGGCGAGACTCTGTCTCAGAAAAAAAAAAAAGAGTAAGGAAAGCGAAGTCCTG
GGTTGGGGGGAAATGTAGCTGCAGGCAAGAACCAAGGAAGGTGTGGAGCCCCCAACCCAGTAGGGAAAAGGCTTGCTGCCTTGAACCCAAAGAGTGT
GAGCATCCTGTACCTTTGCAGACAGAACTTCCACCTACTCACAAACAGATACACCCCACTGCACAGCTAAGAAAGCTAAGGGGAAACCAGGAAGAAG
GGAAAAGAAAAGAGGAAAACCCCAGAGGAAACGAGGAGTCAGGCCTGGGCAGGGGGTTCCAGATGACGCATGAGGCTGCAGGAGGAAAAGGTTTCTT
TTGAAACACATCTTTTATCCTGTCCTTTTCCGATGTACGTGAGCGTGTGTTTTGGAACGCACATAAAACGCGAGCGCAGTAGCCGGCCTCTGATTTC
TGCCAAGGTGGACGGAAACGGAGGGGCGTGCCCAAATGCTTCTTCTTCATGGCTGCTGGATCAGGGAAGTTTTGCTTCTGTGGCCGTGAACATGGAG
ATTTGCTGAGAGGCCAAGGAGAGAGATGATGGGGGAGGGCTACTTCGGGAGAGGAAGTGGACAAGACCAGAGGTTGGAAAACAGGGGACGGGTTGAT
CCTAACAACTTGGAGGGACTGGTACTGGGAATAGGAGGTGGGGCCCAGGGGGAGGGCAGAGGACCCAGGAGCCCCAGCTGTGGACCCAGGGTGGGGC
TGTGGGCAGGTCCCCAGCCCTGTCTGTGACCTAGGGCAGTGCTTCTCAACCTTGAGGGAGGGAGGGAGGATACCACAGAGGGGAGGGAGCACCTAGA
CCACTTAAATCCCTTTCTCTGCAGGGGGCCCAGGCAGCCTTGTTTCTAAGCTCAGCAGGGCCACTTACTATGCAGCCAGGGATGAGAACCAATGGCC
CACCCTGCTGAGTGCTGGAATGTGTAATGAAGTCCTGCGTGGGTCTGTAATGAACCCAGATTCGGCTCCTAACAGGTGCTGAGTGCATGTTTGCAAA
CCCAGGCGCCTGTTGCAAGGAGAGGACAGAGCTAAAGCAAGGAGCCTGCGGAGGAATGGGTGGCAGGGACTGATGAAGTTGGGGGAAGGAGGTGCAG
AGGAAAATGTTGAGGCTCGCTCTGGACTGCCTCGCCTGGGGATGGAGAATGGGGCTGCAAGGGAGGGGCAGCCAGCGCTTTGAACTTGGGTGGGGCC
TCCCTAAATAGAGTGGGGGAAGTCCAGGTGCTGGGCAGGGCTGTCTTCACCTGCCCATCCTCAGCGCCGTGGGGGGATGAGGCGCAAAGAAGCCCTC
CTGGGAATGTGGTGGAAATACCCACCTTGAAAGGTAGAGAGTGGAATCGTTGCCCTGAGCACCTGGGTGTGGTCGCAGCATCCCCCGTGAGGCCTCC
CAACCTGCAGCTGCCTCCTGCGTGCGCATCTGCCACTGCTGGCTTTAGGGCCAGGGCCAGGCCCAGCTGGAGGTCCAAGCTGGAGCCCTGGGCAGTG
TCCCCATGGTGTCATTTGGTTTGTTCCTCTGTCCCTTGTGTTCCCTGATAACAAGAGGTTACCTCTCAAAGCTTGGTTAGATCAGATTAAACGTCTT
TGGCCAAAGAACATCATAGGGAAGGTTGGGGCCTTCCTGCTGCATCATCTCATACCATTCTACTGTCACACTTCTGGTGGAGGCTTTTAATGATCCA
GTTTCCTGGACTCCTCTCCAGAGGCTCTGATCCTGCCACGCTGGTGTTGGAGCCTGGGTGTCTGTATTTTTCAAAACCACCCCAAGTGATCTGCCGT
AGTGTATAGCCTGCATCCCTGACCCCAGTAGCCAGCTGGTCAGGGACTGTCCTTGGTTTTCTGAAGAGCATAGAATAAGAGAGTGGATGGGACAGTC
CAGGTAGGTGCCAGCCCTGGTGGCCAGTGCTATCAGGTGTGAGGCAGGGAGGGTGGCCTCTGGGCCCCCATAAAGAGGAGAATGGGCTTCCTCAGGG
CAGCTCCAGGTTCAGGTAAGAGTCCTTGCAAGACCAGGAGTGCCCCACGCACTGTGCTCCCGGCGTCCAGCATAAGGCCTGGCCCAGCGTGAATGTT
TATTGAATAAAGACACACACCAGGCTGGTGGCTCTCTGAGGAGCCCTGGGGAGCTGCTCTAAGAGTGAGCTCCCAGCCAAGCAGCACAGCTTTGTGT
GTTCCCCACTGGGCTGCTTCTAAGATTCAAACAAAGGACTCCCAAACTGTGGAGCTAGCAGCTGTGTTAAAAGGCCCAGAGAGCCAGCAGGGCCATG
GCCATCACCTGCCCTCAGCTCGCCGTGGAGACAGCCTGTGGGACCTGGGAGAGACGAAGGAAAGGACTGGGCACTCAGTGGGGCTGCTGAGGGCAGT
GAAAGGAGGCAGGGAGGTCCTCGCAGGGAGGTCCTCGCAGGGCCACTGCACCTGCTGAAGCAGGTGCTAGATTCTACATGGAAACGAGTGAAAGAAT
CCCTCCTCTCAAAAAACTCACCATCAATGGAGTCGGTGGACAATTCACTTGAGTGCATTGAAGGTTACCTGTGACGGATGTATAAGAGCTGGGGAAA
TGGCCAGAGGGAACAATTTGAATTGGAGACATTAAAAGGGGATTTAAACATGGGACCTTGAGGGATGAATAGAAGTCTGGAGTCAGAAGCGAACAAG
AGGGCTGGGCAGGCTATGTCTTGTCTTTTACCAGAACTGGCTTGAAGGGTATAGCAATGTGGGGACCCAGCAAAATCCTGGTGTGGGAACCAGCAGA
CTTGGCTGCTCAGAACGGCAGCCTAACTCTGTAAGGTTCTCATTTCCCAATCTGTAAAATGGGAGACTGACTTAGGGTTTGGAGGGGTCAGGAAGGG
GAGAAATGTTACAAGGTTAAAATGAACTAAAGATGCAAACATGGCTTAGGAAAAATTTGAATTAGAATTCCACTTAGTGGAGTGGGAGGCAAAGAAA
CAGATGGCCAAGCTCCAGGAGGAAAAGCTGGCCAAGCTGAGCTCAACTTCAAGGCCCAGCTCGAATGTCACCTCTTTGAAGGGGACTTCTTTGCCTT
CTCCCACTTCCTTCCCCTCAGCACACCTATTCCTTGAAGTCCCAAGTGGGACTTCTCACACTCTGCAACTGACTGGTCACCTGCACTGAGGTGGGGT
CACTGAGGAGGGTGGAGGCTACATCTTTTTTTTTTTTTTTTTTCTGAGGCAGAGTCTCACTCTGTTGCCCAGGCTGGAGTGCAGTGGCACAATCTCG
GCTCACTGAAACCTCTGCCTCCCAGGTTCAAGCGATTCTCCTGTCTCAGCCTCCAGGGTAGCTGTGATTACAGGTGCCCACCACCACGCCTGGTTAA
TTTTTTCTGTTTTTAGTAGAGACAGGCGTTTCGCCATGTTGGCCAGGCTGGTCTCGAACTCCTGACTTCAGTTGATCTGCCTGCCTTGGCCTCCCAA
AGTGCCGGGAATACAGGCGTGAGCCACCGCGCCCGGCCGAGGCTACATCTCATACATCTTGGGCACATAGTATGCAGGTACTGAATGAGGCCCAGCC
TTCAGATGATCAGGTCTGGGGCACTTCAAGAACGATCTGCGTGCTATGAGAGAGACAAGCTCTGGCTGGGAGTCAGCAGGCCTGGGCTGTGCTCTCT
GCACTGCCTCCAACCAGTGGAGGAACAGCAGGGAAGGCACATCGCTTCCCTGGGCCTTAATTTCCCCAAGGAGCTGAACTAGGTGATGTCAAAGGTC
CCGCTTAGCTTTGACATTTTATGACCTAACACTGTAATAGAATCACTAACATGCGTGGCCATTTACAGAATGCTCCTAAAGCCCTTCCAGGACACTC
CTATTGTTCCCCCGCCCCCGCCCTACTCCAATAGCAAGAAAACTTTCACAGGTGGAGACTTTTCTTCAACAGGTCTTTATTGGCTGGGCACGCTGGC
TCACACCTGTAATCCCAGCACTTGGGGAGGCTGAGGTGGGAGGATTGCTTGGGCCCAGGAGTTCGAAACCCAGCCTGGGCAATATAGCAGGACTTCA
TCTCTACAAAAAATTTTAAAAACTTAGCAGAGCATAGTGGCATGTGCCTGTAGTCTCAGCTACTCAGGAGGCTGAGGTGGAAGGACTGGTTGAGCCA
AGTAGTTCAAGGCTGCAGTAAGCTGTGATTGTGCCACTGCACTGCAGCCTGTGTGACAGAGTGAGACCCTGTCTCAAAAAAAAAAAAAAGAAAAAAG
AAAAGAAAAATGGCCTTTACTGAACATCTATCTTTGTACTGATGAGCACCCCCAGAGACACCTGGGCCCACCAGGGTTTCTAGAATGTTCTAGAATG
TTCAGCATCCCCTGAGTTGCCAAGACTAGACATTTAGGGGGAGCTGTATGACAATCACCCAAAACTGATGGGCAGAAATGCTGTGACCCCAAGTAGG
CCTCTGGGCCTTGATGACATCCTCAGTAACAGAGAGCACGGCACCCCTTTGTGTGTCTGAAGGCAGAGGGCTGGGACCCTACCTGAGCACGCACAGG
GCATCTGGGCTTTACCTGGGAGTCCTGAACTGCGCAGCAAAGTGGAGAAACGGACCCAGCTCTCAGCATGTGTCCTTGGGAGCTGCTCCCCTCTGTG
GTCACCAGGCAGCACTTGCCCACCTGTGGGCTTGGTGCCTCTCAGGGAGACGCTCTGGGGTCTGAAGAGTGAGGTCCCTGCCTTTTACCCGTCTCTG
GACACCCCTCTGGGCCTAGGCCCTTCCCTGTGAATCCCCTGCCTGAAGGAAGAGACCCACAGCCCTGGGGTTCCTCTGGGGTGCCAAGTGGGGGACT
GTGTTTGGTCCTGGGGAGGATGGGCTGGGGCTGCTGAGCAGGCCAGGGGTGCAGGACCCCTCCATCCCCCGCTTCTCCTGTCCTCCTCCTTCTTCCA
CCCTTGACTCCTCTCACCTCTTGTCCCCTCTTCCCTCCTGTTTCCACTCTCTTTCCTCCTCCCCAGGTCCCACCAGACTGCTCCATGCCCCGGACCA
CAATTTGGCTGAAGGCAACAATCCCTCTCTCGCACCCTCCTCCCTTTTTCCAGGCTTATCAACTTCACTTTCCTGTGAAATGAAGGGGTGGGGGGGT
GGGTAAGAAAGAAGGAAAAAGCACTTCATGCTCACAACACAACAAAAAACAGGTTTAAACATTTTACAGGTTTCAACATTTTTCAGGCGGTCTTGTC
ACATCTTATCAGATCAGCCAGAGCCGCAGGCAGGCGCTCCAGGAGCTGCTTTGGAGAACAGAAGCTGCAACATTCCAGCCCAGGCACTGCCCCGCCC
TCCACACCCCTTCCCTCCCTTCCCTTTTCTCCCCAAAGAAACATCCCACAGGGCTCCCTGGGATGGAGCACAGGGCCCGCAGCCTCTTCCCTCTGAC
TGAGGTATAGTCTGTGGCCAAACCCTTGGCTTTGAGCTTCTGCCCGCACCCTTTCCTTCTCCCCACGGCTGCCCAGAACCATGGTCCTCCCGGGCTC
TCAGGTGGTCCCTGGCAGCTGAGCTGTGCCACCTCCTCGGAAGGCCCCTCGTGGCCCTGAAAGGGAACCTTCAGAAGCTGCGGGCAGAAGGGAGTTG
CTAAAGTCGTCCACAGCATGTAGAAGTGGTCATTTGGCCAGCAGGGCTAGTGAGTTTCCGGGGCTCCTGGGGCCTGTCCTCGGGGGCTCCTGTCGGA
GGGGAAGGAATAGCTTTTTCCTTGGTTATCTTTTCTCCGTGTGCATGGGTTTTTCTCCTATGGCGTGGATCACTGCCTGGGATATCCCCTTCCACTC
AGTCACCCCCAGACCTCACCTTTCTGTTCCTGCTGCACTCACGGTGACATTAGTGACACAATGCAGGGTGACAGGTCCAGGAAGGGCTGGCCAAAGC
CCAAAGGCTCAGAGTTAAGCCGAGGCAACGTGAGGGACAGACCCAGAACCTGGATCCCAGGACAACAGGGAAGAGCTGGCTTTGTAGCTTGTAACAG
GAGCATGGTTAGGGCTGGGAGGTCCCACTGTGTGGTCAGAGAGGGGTCCCCAAGGGAAGGCAGCTGTGCACTGAAGGCTTAGGATGCATCATAAGAA
AAGCAAAAAGGGGAGGCCGGGCACGGTGGCTCACGCCTGTAATCCCAGCACTTTGGGAGGCCAAGGCGGGCAGATCACGAGGTCAGGAGATCGAGAC
CATCCTGGCTAACACAGTGAAACCCCGTCTCTACTAAAAAATACAAAAAAATTAGCCGGGCATGGTGGCGGGTGCCTGTAGTCCCAGCTACTCGGGA
GGCTGAGGCAGGAGAATGGCGTGAACCCGGGAGGTGGAGCTTGCAGTGACCCGAGATCGCGCCACTGCACTCCAGCCTGGGCGACAGAGCGAGACTC
CATCTCAAAAAAAAAAAAAAGAAAAGCAAAAAGGGGAAAGCGCAGAGGAGGTAGGGGCACAGTGGCTCCCTCTGTGTAGGTATGTTGGCTGTGCATC
TCGTGGGGACCTCGTCCGGAATATGGAAAACACAAGCCAGACCTGGGCGCCTGCTGCCAGTGTTGGCTGGGCAGGGGCTGAGGTTTCGGGAGAGCCC
ACCTTTCCAGCCTCCTAGTGTGAGGTTCAGGCCCTGAAGCTGGGCTGGCTGCCCCTTGGCCCCCAGCCCCCTCCCTGGTGCCTCCACCCCTTGGCAT
ATGGCATCAATGCTCCCACCGTGACGCTCAGTGTCCTCCCACCGTGTGCCCACAGCCAAGATGGGGCCTAAAGTATAATTCAACTTTTAGCTCCTTA
CAAGCATCCCCAGATGGATTTCTAGCTTCCGTCCCTCTCTTGGGCCCAGCTCTGTCTCTACGTGGTGCCTGGAAGTCCCTCTGGCCCCACGCACTTC
CTCGTCTTGTTCCCAAAGCTGCTTTGCTTCTTACCTTCCCATCTTGGTGGACACCATCTCCATCTTCCTGGTCATCCTGGCTCAAAACTTTGGCCAT
ACTTTCCTCCTTCCTCCTGTTTCTCATGGGACCAAACGGCTACCAGTCCTTATTCACAGCTTCCTGTCTGTTCCTGAAGCCACTGTCCTGAGATGAC
CAGCGGGCCCATCCCCTGCCACAGACCCCGGTGACCCAGACACATGGGTCTTGGCCCAGCTGCACAATGAGAGCTGAGCCCTGGGAGGTTGCAATGG
ATCCCCAGGCCCCAGAGTCTCCTTAGCATCCACGTCAACCCCGCCTCCCAGCCGCTTTCCCAGCACCCACCTCTTGTCTCATTTTGCACATAACTAA
CAGGATGATATTCCAAAGCCCAGCTAAGGAAGGTGCTAGTTTGTCCGAATAATGTCTGGCACTCAGGGCCCCTTTCTAGCTGCTTCCCCTCCTCTGC
TTCTCTGTGTGGCTCCTAGACCCTGGCTTGGGGAGGCATGCCACCTTGCCTGGGGCTGTCCCCCTGCCACCTGGCTCCACCTGAGGGCCCCTAGCCA
TCCTTCTCCAGCTCGGTAGCTGCTCCACATGGAGCCCTCCAGAGGCAGTGAGGACACACTTGCCCCCGTTCCTAGAGATCGCTCGCCCTGACCATGC
ACCCTCTGGCCCAGAGGTTACTGGGGCTGAAAGTTACAAGTGCCTTGGGACCATGTCTCACTCATTTAAGGCACCCACAGTGCCCAGACCTAGTAGG
TGCTCAAGAAATGCTTGTTGGTCTGTTACTGACAGCAGCCTCCTGGGCTGGGTGCTCCTCAGGTGTGGCTTCATTAATCTCCACGTTCCCAGAACCT
GGAACCCTGCCAGGCTGAGAGTCATCACTCAATTCGTGCGTGTTGAGTGAATAGGCAGTGAATGACTTTGTTTACCAAGGCCAGACTTTAACCTGCT
CCCGGGCAGCTGCTCCTTCATGGTTTTATCTCAAGACCTTGGGTCCCAGCTCAGGGCCTGCACCCACTCTACCCTCACCCTTCCCTTCCTGTCCTAG
ACATAGGCAAGGGTGCTCCCACCCCTGCTGGAGATGCAGGCGAGCCAGAGGGCCCCGTTGAGAGAATGAACTAGCCCCGTTGAGAGAATGAACTAGC
CCCTAATGGCAAGGCCCAGAGACATGTCCCACTTCTTTGATGAAAGGCACCCCCTGAGGCACCTTGGCGCTCTCCCACAGCCACAGGACACAGCCCC
ACCTGAGTCCCTTTGGGCTCAGAAGAAACCCCCTACCCTTGGCCCTGCACTGAAATGTCAAGAAGGTCCAGACCTGTGCTCAGTACCCGCAGGGTGC
ACATGTGTTCCAGGAGGGCGAGGAACAGTGGCAGCTGGAATCCTGAGCTAGGTTTCTCTGGTTTTGTCACAAGCTCCCTGCCAAGCAGCCAGGTGAG
CGGCTCCAGTCCAGGCCTGTGGCCTCCCTCATCCACAGCAGTGATTGCCTCGTCACTTTGGGTGTAGTTGGGTGCATCAGAGCCCACCAGGCCCAGC
CCCACGGTGTGCACACATGCCCCTGAACTGGCTAGGCTTCCTGTCCTGACATCTGCCAATCCTGAACGGCTTCTTGACCTAAGTGGAAAGGTAGAGG
CCTGAGTTCCAAAGCCAACGCTTGGTTCCTCACTTCCTGCTCTTTCCTCAAACCTTTCCTTTCCCTTCTAGAAGTTTCCGTGGAGGGTGGAGCCCTT
CTGGGCCCAGGAACAAGTTGGGCCTCTGTCCAGTACTGCCCAGGAGCCAGCAGGTGGAGCACCTGGCCCTGGCCTGTTGTGGGGTTGACAGGAGCAC
TGTCAGTCATTTTAAGAGACACTAGATCTTCAGATCAGAGTCTTAAGATGCCTTCCCTTTGAGGCTGGCACAGATGGTTAGATTTCCGCATGGAGAA
AGGTAAGGGCAAAGGGCCTATTTCTGCAAAGAAGGCATGACTTGGGGAGACTTGGCCCTGGAGAGCACCCTGAGACCGGAGGGAGGAGGGGAGCCTT
TCCCTGGGCCGCAGCCCCTGGGTCCACCTTCTGCAGCCCCACCCATGTGAAGCCAGGTGGGTCCTTTTTGTGCCCAGCCCCAGAGAAGCTTCTGAGA
ATGTGCATTCATCACCCCCAGGTTAAAAGCCTGGTGGGTAAAAGAACTGTGAGCCCTGGGTTCTCCTCCCACCTCCTGGGCAGCCAGCTGTGTGACC
CCGGAAAATGACAAACCTCTCTGGGCCTCAATCTTCCCGTATAGAGGAAGAGGGAATTAGACTAGACCCGGGGCTCTGGAATTTCGTCCTGCACAGG
GGCTCTAGGTGCAAAGTTGAAGGCTGGGGATGCAAGCACCATCCCTCCTTTGATTTTTTTAATTTTGCTATTTAACCATTTTAAAGTGTACTATTCA
GTGGCATTAAGTACATTCCAATGCTGTGCGACCATCACCACCGTCTGTTTTCATCATCCCAAACTCTGTACTTATTAAGCAGTAACTTCCCACTCCC
TCCCTTCCAGAACCCCTGGCAACCTCTGTTCTACTTTCTGTCCCTGTGAATTTACCTAGACACCTCATGTAAGTGGAATCATACAGTGTTTGTCCTT
ATGTGTCTGGCTGCTGTCGCTTAGCTTCTTTTCAAGTTTCTTCTATGTTGTAGCTTGCATCAGAATTTCATTCCTTTTTTTTTTTTTGAGACAGAGT
CTTACTCTGTTGCCTAAGCTGGCGTGTCTTTACCTAGAACTTCATGTAAGTGAAATCATACAGTATTTGTTCTTCCGTGTCTGGCTTCTGTCGCTTA
GCTTGTTTTCAAGTTTCCTCTACGTTGTAGCTTGCATCAGAAGCATCAGAATTTCATTCCTTTTTTTTTTTTGGTTGGGGGGACAGAGTCTTGCTCT
GTCGCCCAAGCTGGAGTGCAGTGGCGCAACTGGCTCACTGTAACCTCTGCCTCTCAGGTTCAAGCAATACTCCTGTCTCAGCCTCCTGAGTAGCTGG
GACTACAGGCACGCACCACCAGGCCCGGCTAATTTTTGTATTTTAGTAGAGATGGGGTTTCACCATGTTGGCCAGGCTGGTCTCGAACTCCTGACCT
GAGGTGATCCACCCGCCTCAGCCTCCCAAAATGCTGGCATTACCGCCACCACACCCGCTTCCTTCCTTTTTCTGGCTGAATAGGGTCCCACTGTATG
TATGGGCCACCTGTTGTTTATCCATTCATCTGCTGAGGACTCTTGGGTTGTCTCTACCTTTTGGCTGCTGTGAGTAGCACTGCCGTGAACACTGGTG
TACAGGTGTCTGTTGGAGTCCCCATTTTCTTTCCTTTTTTTTTGAAACAGAGTCTTGCTCTGTCACCCAGGCTGGAGCGCAGTGGCGCCATCTCAGC
TCACTGCAAGCTCTGCCTCCCAGGTTCATGCCATTCTCCTGCCTCAGCCTCTCTGAGTAGCTGGGGCTACAGGCGCCTGCCACCACGCCCGGCTAAT
TTTTTGTATTTTTAGTAGAGACGGGGTTTCACCGTGGTCTCGATCTCCTGACCTCGTGATCCGCCCGCCTCGGCCTCCCAAAGTGCTGGGATTACAA
GCGTGAGCCACCGCACCTGGGCGGAGTCCCCATTTTCAATTCTTTTGGGCGTATACCAGGTGTGGCATTGCTGGATTATAGGGTGATTCTATGTTTA
ACTTTTTGAGGGACAGGGCCCTCTTTTCATATGTTCTGTATGTAGGGGAGAGGAGGGAGATTGTGTGTGATTCCATTTGGGAGGCCACCTGGTTGGG
TGCAGGACTGCCTACCCTAATGGATCACTCAGGGGAGTGGGTGCTGGCAGCACAGTGGGTGTCCCTGGCAGCACAGTCAGACCCCCATCAGCAGGGG
ATTGGCCGTCACTGGGTGGACGGCAGCATCTGAGGCCAACAACCCCAGTGTCAGATCAGGCAGGACGCACTGTACAGGGTGCCTTTAGGTGTCTCAC
CATATGTTAGGTGCGTAAGTCAATGCAGCATCCAGGCTGACCTGAATTCACTGATTAAAAATGTTCTCTAAAAATGTTCTCTATGGCCAGGCATGGT
GGCTTACGCCTGTAATCCCAGCACTTTGGGAGGCAGAGGTAGGTGGATCACTTGGTCGGGAGTTCCAGACCAGCCTGGCCAATATTGCGAAACCCTG
TCTCTACTGAAAATACAAAAATTAGCTGGGCATGGTGACGCATGCCTCTTATCCCAGCTACTTGAGAGGCCGAGGCAGGAGAATCACTTGAACTCGG
GAGGCAGAGGTTGCAGTGAGCCAAGATCACGCTTTGTACTCCAGCCCGGGCAACAGAGCAAGATTCTGTCTCAAAAAAAGAAAAAAAAGGTCCTCTC
TGCCTTGTGCTCACCATGCAGGCCTCCTGCAGCCCTCTGGCCACAGCAGGCGTTATCAGGGTAGAGGCACAGAACTGGGGTGGGGATGGGAGTTAGA
TAAGGCCATGCACAAGGTTTAGGTCTTGCCTATTTGTGGAGGGATATTTCACTCCAAGGGGTCAACACCAAAGTTTCCACAAGCAGCCCGTTGTGCA
GGGCACCCGCAGCCCATCCGCCTGGCTGCCCGTGTGTGTCCTTGGCCCAGCTGGGCAGTGGGTGGTCGGAGTGGAGGATGAGCCGGCTTCAGGAGGA
GGGTGGCAGGGTCCTAGGGAAGGGAAGGGCCGGGCCAGGAGCTGGGTATAAATAGCCCCTGGCCCAGCTGCGAAGGCCTGGCAGGGTCCTCCGCCCT
CCCCCTCACCAGCTGTCAGTGCCAGGCAGGTCTCTATCCCCCTTGGGAGCCTGGCCATCATCTCAGATCCTAAACGTAGGAACTTCCTGAGCGGAAC
CAAGGAGTCTTGTCCTGTGTGTAGGCGGAAGCTCCGGATGCCGGGAGGTCTGGCGAGTGAGGGGCATCAGGCTCGTCCTTTGGAAGAGTTCTTCATT
CCTTTCCTCCAGAATCATGAATACCTAGCATGTGCCCGGCCCTTTGGAAGACCGAGTGGGCTGGGGTGTGTGTGTTGTGTGTGTGTGTGTGTGTGTG
TGTGTGTGTGTGTGTGTGATGGGGTAGGGACCGGGGAATAACTGGAGAAAACACTACCACTACCTCTCTTCTTGGAGACTGAGACTGGCATAGCCAG
ATGGAATTGGAAACAAATCAGTTCAGCACTTTGGGATAAGAAGGTTTGAATTAGGTACAGGAAAGATTCAGGCGGAGGAGAGGTGACTTCTGTCTGG
AGCTCACAGAAGGCTTTAGAATGGTGGTGACCTAGGAATCAGGTTTCGAAGGATGGTGTAGAATGGTTGCCGGGGGCCGGGCAGTGGAGAGGTGCTT
CGAGCCGAGGGCTCAGCATGTGCAAATGTGCAGAAGTGTGAAACAGCCCCGCTGGAGTCATTCAGCTGGCTAGGCAAATCCGTCAAAGCCACGCACA
CTTTGGCACAAAGAATCGAGGAGCATGAGAGTCACTGTGCCGCCTCCCGAAGTGGAACGTGTACTTCAATAATGGGGAATAGGAGTGGCGAGTTAAA
GTAATGTGTCTGCGATGGTGGAATTTCAGCAGTGTGCGGGCAGGAGGCTCAGGGTGGGGGTGGCCGGGCATGTTTGGGGAAGGGCAGCCATCCTGCA
GAAATCAATCCCATGGCCACAGCCTCTTTAGTCTCCGACACTGGCCCAGGAGCTAAGCCCCATCGCCAGAGGCCTTGCTAATTACTCGCAGGATGAC
CCCATCTGAACTGAAGCCTTTGAATGGAGCATCCTGAAAATGTCCTTTTGCCTGCACTCTTTGAGTGACCTTGAACCCTCATCCAGATCACAACTGT
CTTTGTTCTGCCACCCCTGTGAGGACTGAGGTCTGATCCAGGCATCCTTTCCAGTGTTGGATAGGAAGGGGCTGAGATTTCTGATGTGTTCTACCAA
GTCAGGGATGCAAGGATGGGAGAAATGAGGTTGGTGACAAGGCAGGGAACAAAGTGCTGGGGACAGCTCCACACACACCGTAACCATAGCAACCACC
ATCTAGCAAGGGCTCCCCACGTGCCATGCACTGGATTGTGTCACTTATTCCTCCTGTCGTGTCTATTTTACCGATAAAGAAACTGAGGTATAGAGGT
TAAGAAAATTGCTGAGATCAGCAGCTAGGAAGTGGTAGAGCTGGATGGGACCCTGGCACCATGGCTCCCAGGTCCACAGTTGGTGGGACCTGGGCAA
CAGGAAGGAGACAGGGTTTGGTGGAAAGAGGGAAAACAGCTCATCATGACTGAGGCTCAGGAATTGTTCTCAGAGGACATCACACTGGGAGTCAGAC
AAACTCAGGGCTTGAATTCTGGCTCAGCCACTTCCTTGCATAAGTCGCCCAACTACTCCATGCCTCAGTTTCCTCATCTGCAAAATGGGGATAACAA
TGCCCACCTCCCAGAGTTGTTGTGAGGATTCAGTGAGATTATGTATTTGAAGTGACTGGCACAGAGCAAGTGCTACATAAATAGTTGTCATTAGTAT
TGCCAGTATCCGGGTAACTGTGGGGACAGAAGGAAATCCCTGTGGGGCAGAGGAGAGACTGCGTCTGCACAGCAGGAAGGGCTCAGTGGCACCTTCT
TCCTGGAGATGTCTGGGAAGCACTCCGACCTTTGAGGCCAATCAAGCCATGCAGGCAGTGTGCCAGAGCTCAGGTGCTCTGCTGGGCTGCGAAGACC
CACCTGGGACCCTGAGGGAGGTAACTGGTGAAACCAGGAAGCAGGGAGCCCCTTGGAGAGCTGGGTGAGGAGCCGCCTTGCCAGCATGGGCCCCCCG
ACTCCTCAGTCCCCCAAGCCAGCCGGCCTGGCTTTCTCTGTGGATATGGCTGTGTGACCTCGCACAAGTTGGTCCTCTTTCACGGCCTCTGCTTTTT
CTTTTTCCaTTTTTGTTTTGAGACGAAGTCTCGCTCTGTCGCCCAAGCTGGAGTGCAGCGGCATGATCTTGGCTCACAACAACCTCCACCTCCCAGG
TTCAAGCGATTCTCCTGCCTCAGCCTTCTGGGTAGCTGGGATTACAGGCGTGAGCCACCTGGCATGGTCGGCCTCTGTTTTTCATCTGTATAATGGG
CTTTGTGCTCCCTTAGGGCTCCTCCTGTGGGTTCTGCTGCTGGACCAGGGCTCAGCCTCCAGTTTAGCTTGAGGGTGCCCAGGCCTGCAGAAGGTGT
CAAGCAAGGGCTGGGAGAGGGGGAGGAAGGAGGAGGCAGGAAGGCAACGGGAGGGGAAGGAGGAGGGCAGAGGAAGGGTCTCCGAGTGCCTCTCACT
CCCGCCTCAGCTCTCCGCTCCAGTGGTCCCATATAGGGCTCTGGGTCCCAAACACCAGAGGAAGGAGCGGGGACAGCCCAGGCTTCTTCCCTGGGTC
TTGTTCCTGAGCTGCCCATCTAGGATGGTGCAAGGCCGAGTTGTCTGCACTGAACTCTCCTCAGTTTCCCCTTCCAGTGATTGCAGGGCTGTGGGGG
CAGCTGGCACAGCAGGGCTGGGCTGGAGATGCTGCTTAAGAGCACGGGAGGGGCAGCCTGAGCCCAGAGGGAGGCTCAACGGGGACCTTTGCAGCCT
GGCAGACAGGGCAGGGTACTTAGCTCCCTGGCCTCAGTTTCCTTATCTTGGAAATGGGACAATGGCGATGATAATGAAGTTTTTATTACAGACCTGC
CGTGAGGATTACATAAGGTAACAGACACAAGCACTCAGAACTGTGTCCAGCACATGATAGGCCCATAATAAACCACAGGGATTATATGATCACTCTA
ACCTGCTTCTAACAGGGCAGGGGCAGTGCTGTGTGCGCCGTGTGCCCATCAGGGCTCTGGGCTCACTGACTCTACCCACTCAGGCATGTGCTCAGTA
TGGAGGCCCAGGGTGCAGATGGGCCAGGCCTGAAGCCACCTTCACCCCATGAAGACCCAGGCAGGCACTGCCCAGCAGGCAGGGTCACATAGTGATG
ACCCCCATGGGCTCTGGAGTCTGACACCCTGGGTTCCAACCAGCAATTCCATAGGAGCTCTGTGGTCTGGGGTGCTTCATCAACCTGCAAGGCTAAG
CCATCTGTAAAATGGGGCTAATAATGACCCTACTTTGTGCTGGGGCTATTTTGAGGATTAAATGAGGCAAACCCAAGGAAAAGCCTCTGCTCAGGGC
CAGGCACCGGGGAAATCAGTAATTAGCCATTACCACCGATAAATCAGAACTTCTGGGCCGGGCGTGGTGGCTCGCGCCTGTAATCCCAGCACTTTGG
GAGGCCGAGGTGTGTGGATCACGAGGTCAGGAGATCGAGACCATCCTGGCTAACATGGTGAAACCCCGTCTCTACTAAAAATACAAAAAATTAGCCG
GGCGTGGTGGTGGGCACCTGTAGTCCCAGCTACTCGGGAGGCTGAGGCAGGAGAATGGTGTGAACCCAGGAGGCGGAGCTTGCAGTGAGCCGAGATC
ACGTCACTGCATTCCAGCCTGGGTGACACAGCGAGACTCTGTCTCAAAAAAAAAAAAAAAAAAAAAAGAACTTCTGGCTGCTGCTTCTTTCTCTTTA
GAAAAAGCTCAGTGCTTAAGACCTGGAATGCCTCACAGATGTTACCATCCAAACTCCCAGATCTGGCTCCTCAGTTCCTCCACCCAAAATAAACAAA
TGGAAAAAGGAGAACCTGCCTCTCCCCCTGACAACTGAGCCTGGAGACAACCAAGGTGGATGGGTAGCATGCCCCTGCACGGTGCCCAGGGAGCTCT
GTGCCTTGGAGTCTCCACGAATTGGCCAAGGCCAACATCAAGCTCAAGTATGGAGGAGGGACCCGGGGGAAGGCACATGGCACTCTCTGACCCACCA
CAGACCAAAAAGCCGTAGGCAAGCTAATTCACTCTCTAAACCTCAGTTTCCTAGTCCAGGAGATAGTGATGTTCTTCATGTTTGGGAATTGATCAGA
AATGTTGTATATAAAGTGCCTGGCAAGCAGTAACAGTTGCCAAATGGCAGATGTTTGGCTCGGCCCTGTGTCCAGCCCAGAAGCTTTTGTGTACTAA
AAAGCACACAAAAAACCTCACCCTGCCCCATGGGGTCTTCTCCCGGCCCCTCTTTCCGAGGCTTTTGCCCATCACTTTTTGTGGGAAACTTGACTTA
GGCCAATGCTGGACCAAAGCCTTGGTCAGTGCTGGACACAGAGGGAGAGGAGATGGGCCCCTTCTTCCAGCTCACACTGCCCCTGGTCATAGAGCAG
ATTGCAATTGTCCTTGAAGGCCACTGACACTCACGGATCATTTTCTCAGGTTCTCCCAGAAAATGTCATTTCTGCTGTTCCTGTGCTGAGGGCAGGG
AACGGAAAAGTCGTAATTCCTACCTTGGTTTTCTAGTATTTTAAACTCTTCTGCCCCACCCCCATAAGGTCATTCTTTCTGTTGTTGACTATAAAAC
CTGAGAGAGTTGATGGGATATTGATTACAAAGCGAGGGGCAGAGGAATGGAGTGAATTGACCAGTCACCTGGTGTTGGGTGTGGGCAGTGAGATCTG
AGATCTCCCTTCTGACTCTGTGCTAAACTTGTTTTGACACAAAGCCAAGCTCCAGTCTCTCATGAGAAAAGAGGTGGAGCTCTAGAAACTTCTAGGA
AACTGGAAAGATGGTCATGGAGGCCCTGGTAGACAAAGGACTTGGTGCAAGCCAGCAATTCCTTGGGGAGATACTGGGAGGCTCTGGGCTGGGCTGG
CACCATCGCAGGGAAGAGGCTGAGGGCATTGCCAAGGGTAGTGTGTGTGTGTGCGCGCGCGCGCGTGTCCCATGAGTCACTGGAAGTGTCCATGTGG
CCCCAGTATCCTGGACTGCCTTGGAAATTGCCCAGCCTGATCTCTTCAATGCCCATCAGGGAAGCTGGACCCAGAACCTGGAAAGGACTGGATCTGG
GCCCCAAATACCATCTTTCTAGTCCAAACCTCTTTTCATGGCTTTGCATTGCCCCCAAGGGCCCCCACAAGCGGCTTCTGCGGTCCCATCCCCCTGC
AAGCTGGATGCAGCCAGAGGGCTGACTTGCGTGGGTCAGAGCTCTGCGCTTTGAGGGGCGGCATGCTCCCGAGGTCAAAGGTAGCACATTCAGGTGC
CAGGGCACAGGCCCTCTGCCTCTCCACCTACCCCGGAGGGTTCACAAAGCGGCCATGGTGCCCAGGATGGGCTCTGTGCTTTGTGCCCACAGTGTTA
CTACCCTCTGTCTGCCTGCAGGTCCCTGGCCCTGGGCCAGCAGTACACATCTCTGGGCTCACAGCCCCTGCTCTGCGGCTCCATCCCAGGCCTGGTC
CCCAAGCAACTGCGCTTCTGCCGCAATTACATCGAGATCATGCCCAGCGTGGCCGAGGGCGTGAAGCTGGGCATCCAGGAGTGCCAGCACCAGTTCC
GGGGCCGCCGCTGGAACTGCACCACCATAGATGACAGCCTGGCCATCTTTGGGCCCGTCCTCGACAAAGGTACTGCCTTGGGGCTGAGGGGGGGGGA
GGGGCTGGGTGGGGGGAGGGATCAGGACTGTATGCCCTTCCACCCCAGTCAGGGTGCCTCTTCTCTGAAGCCAGGGTCCCTCTGGGAGGGTGATAAA
TTTGGTTGCATGACTGCCACACCTTCCCAGGCGCTGCTGGGGGCTGGGCCGCCTTGAGATGCTCCAGGATCCTGAGGTTTGAGGGCCGACACCAAGA
AGGCCACAGACTTCCTTCCTGGCTTTTGCACAGTGGGCGCCTCAGGCTCCTGCTGTGGACATTTGTGACATTTCCCCAATGCTGTGTTAAGTGCTAT
GCAAATACCGCTTTGGGGTGGGGGTGAGAGCATTGCCACCCCTAGGTCCCTCCCATCTAGAAAGTCCTCAGTAGGTGAGGAAGCTGCCTGGTGCTGT
GGTAGCATTGCGTTGCCCCCAAGAGCCCCTCTGGGTTTCTGTTCATCCTCATGCCCTGTCAGCTGGATATGCCCAGGAATCATGGTGGGGCTAGAGG
GTGCACTGGCCTCTGGGTAACTTTCCGGCCGTCTTGCAGCCTGGGAGTCTAACTGGCTGTGCCTCAAGTGGACAGGGAACCACATGATTTGACTTTG
AACCTGCAGGCCCTGGGAGGGAGGCTAAGTGGGACAACTCCTCCCAAGAAGGGGACTTGGGGGCTCATGGACTGGGTGGAAGATGGGCAGCTCTTTG
TGGAACGGCAGTGTCCAGGAATTTAACGATCCTGGCCGGGCTGGCCACAGCCAGAGTTGCTCTGCCACCCAAACCGCTGAGCCTGGCCCTCCCTCCT
ATTAGAAGCTAGGGAATGAATGAGAGCTGCCTATACAGCCAGAAAGAAAAGGGATCTGACGTTCAGGTGAAGGGGTGGGGTGCTGGGTGGGGTTGGG
GGGGAAGCTGACAACCCCCATTTTAGAGTGCAGTTCOCCTTTACCGGTGCCTCAGGTGCTCAGGGTCTGTCCCACCTACAGGCAAAGTGCTGGCTAT
TGTCATGGGACAGGAGGGTAATTAGCAAATCAATGGATGATGATTCTGTTTACGCTTCTATTGCCAAAACTAATTATTCCTTGTTGACATAAAAGAT
TTGGCCTCTTAATTGGGGCCAAGTGGCGGCGGTTTGCATTTCAAACTCGTTCTTGTCGGTGTGTTGGTCTCAGCGCTTTCCGGTGCCCCTCCTCGGG
CCAGGTAGCGCTGAATCAAACAACCCTGCGTCTAGACGCGCTCCCCAAAAGCGAGTCACCTCTGATCGCTCTTCCCGTCTCCGGCCAAGAGCCAGGG
GAAAGCGGCTCTGGGAGCGCTACCCATTCACTCCGCGTTGAACGTTTTAAGTCACCACCGTAGGTTCTGGCACACGCCCCGGTCCCTAGATGGCCCG
AGGACAGGTTTGGGTTGCGGGGGGAGGGGCGATGTGTGCCCGAGAGTTTGGGAATTTGCTGGCGGCGGCGAGGAGAGCATCCCGGAAGACGCCGCGA
GCGCATACGCGCCCCGGTCGGTGCCCAGAGCCCGGACCTTGAACCCAGGTTCGCGCCCAGCTCCGGCCCCACGTTTGCACCCCGCCCCCGGCGAGTC
CCCACACCACCGCCGCGTGGGCGGCCAAGGGTTAATCTCTGCCCCGCGCTTTGAGACCCGGGGCGCAGCGGGTCGGGCAGCCCGGGGCGCGCGTCTT
CCGCGAGTCTGGGGGCGGCGGGGTCGGCGGCCGGAAGGGGCGAGGCGCGGCGGCGGCGCGGCGGGCCCGAGGCGCTTCCCCAGGCGGGGGCGGGGGC
AGGGGCGGGGGCGGGCGCCGGAGGGGCCTGGGCGGCCTGAAAAGCGCCCGAGCACCGCCCCCCCACCGCGCGGCCGCCGCGCCATTCACACGCCCTC
TGGCCATTCGGCGCGGCGCGGCGCGGCGCGGGGGCGGGGGGCGCCGCTTCAATGGGGATTTCGCGGCCCGGCGCCGGGGCCGGGGGCGCGGCCCGGC
CGCGGGAGCCGCCCGTTGCTACGCGGTGGCGGCCGGCCCGGCGGCCCGGGCCCGGCGGCCGCATTATGCGGGTAATGCGGTGTGACACCGCGCGAAC
AAAGGCGGATTGAGCGGCCCAGCGGGCCCCGCCGGACGGGGAAGGCACAGCGGGGCTGTCAGCGCCGCTCCCAGGCTAATCCCCGCCCCGCCCCCGC
CGCCCCCGCGTTCCCGGGGCTGGGAACCCAGCGCGGCCCGGGGCCCGGGCGCCGCTGCCGCCGCGAGAGGCCGCAGGCCGGCCGGAAACGAGGGGCG
CCCGCCCTGTGAACCCGCCCTCGGCCCCTCTTCCCCGAGGCGCCCCCAGGGCTGGGGCGTCTAGGATTGGGGCGAGTGAGCGGCGCGGCTGGGACCC
CGAGGCCGGGAGCACAACTGGACGCGGGACGTCGGGCCCCCTTGCCGCCGTCCTCGGTCGGCCCTGGCAGCGCAGGCGCGGGGCGCGGGCGGGACCA
GCTCTGCACTCTTCGCCCTCCCGTCGTTGGAAGTGGGACGGGCCCCTCTGTAGGTGGCTCAGGAGGGCGTGGGGGCCGCGGAGAGCGGCCGCGGGAG
CCAAGAGGGGTCCCGGGCTTCCTTCTTGCAGCACTCGGCCAACAGCCCAGGAGGGGAGGCGGGCGCCTGGCTTCTAAATAAATTTGGTCACATTTAT
GACCAATTTTGCCGACTAGGCCGGCCCGGCGTTTCACAGCCTGTGTCAGGTGGCGAGTCACCTCCGGCTCCCGGGTCCTGCCATGAGGAGAGAGATG
GTTGGGCTGCAGGTCTTGCAGGCCTTGGCCTCCCTAATCGTCAATGTCCACATCTATAAAATGAGTAAAACTTTCCATGTGAATGAAGCACATGCAG
AGACGATGACCGTTGTGAGGAGGCTGGAGCACACCCTTGAGAGTCTCTCCTTTCCCTGCGCTGGACCCTGGGACAGAACCAGGGGAACTGCCCGGTG
TCCCTACCCTTCTGGGAGGGAGTTGGCCGTGCCTGGGCGTGAGGGCAGGAGAATGGGGATGGGGAGACTGAGGCACGGGCCACTGCCCTCCTGGTGA
GGGGCTCTAGGAGCGGAGGGAAGCCGTGTCCATTTTACAAAAAGGGCGACTGAGACCGAGAAAAGGAGAGGGGCCGTCCCTATGCATCCACGTGCGG
AAGGGGTGGGCCTGGGCAGGTTTAGGCTGTAGATTCCCAGGCCTCCCTCCTTACAGACCTGGATCTCACTCAGGCGTGGGAGGGCTCAGGCCTGTGC
AGGGTGGTCTCTGGACTTTGGGAAGGTGGAGGGCAGGGGGTGTGGGACCAGGACAGAAGTGGCTGCCTTATCTCTGCAGCAACCTGCCAGAGCTTTG
GTGTCGGCGCCTGTTTCTAACAGGCACTGCTTTGCCCTGTGGCATTTGAGGTCCTGAGCTAATCAGCAGCCCAGGGCCTCAGTTTGCTCATCGGTGA
AGTGGGAATACCCAACTGGGTCTAAACCAGCCAAAGAGGGTGGGGAAGCTGCCTCCCTCTTGCCTCAGGGCTGGTGAGCTCTTCAACTCTTCCTGGC
CTCGTTCCCCTCACGTCCTGGCCTGGGAGGTGGAGGCAGGGCAGGCGCTCCCAGGCCGGGTCCTGAGTGCTGCCTCCCCACGACCTCCCCGCAGCCA
CCCGCGAGTCGGCCTTCGTTCACGCCATCGCCTCGGCCGGCGTGGCCTTCGCCGTCACCCGCTCCTGCGCCGAGGGCACCTCCACCATTTGCGGCTG
TGACTCGCATCATAAGGGGCCGCCTGGCGAAGGCTGGAAGTGGGGCGGCTGCAGCGAGGACGCTGACTTCGGCGTGTTAGTGTCCAGGGAGTTCGCG
GATGCGCGCGAGAACAGGCCGGACGCGCGCTCGGCCATGAACAAGCACAACAACGAGGCGGGCCGCACGGTGAGCCCGGCTACCCTCCCCAAACCCT
TCAGGGAGCAGCCCCCCGCTTCCCCTCCGGAGCTGCCCTGGCCCCCACCTCACCCCTTCCGGCAGCCCTGTGGGTCGCGGGCTCCTTTTCCCCTTGG
CCAGGCTTGGCCTCCTCCCCACCCCACAGCCACTTCGTCTGTCCACCCTCCTTCCTCCTTGGGCAGTTCCTGGACTCCACCCCACCCGGGATGAGTC
GGCCTGGGAGCATGGCCACCCCGTGGGATCAGGTGCCACCCACCACCCATCCTGTGCACCTTGGCACGCGGTGTAGGGCTGTCAAGTCCTGGGAACC
TGGCTTTGAATTCAGCCTCCACTCCCTTACTATGCTTGTATGATCTAGGGTGAGTCACGTTAAGTTCCCAGCCTCAGTTTCCCCATGTGTTAAATGG
AGATAACTCCTATTTCTTTTTTCTTTTTCTTTTCTTTTTTTTTTTTTTTTTGAGACGGAGTCTCGCTCAGTCGCCCAGGCTGGAGTGCAGTGGCTGG
ATCTTGGGTCCCTGCAACCTCCGCCTCCCGAGTTCAAGCAATTCTCCGGCCTCAACCTCCCAAGTAGCTGGGATTACAGGCGTCCGCCACCACACCA
GCTAATTTTTGTATTTETAGTAGAGACGGGGTTTCGCCATGTTGGCCAGGCTGGTCTCAAACTCCTGACTTCAGGTGATCCTCCCGCCTCAGCCTCC
CAAGGTGCTGGGATTACCACCGCGCCTGGGCAACAACTCGTATTTCATGCGCTGTGAGAAGTGGACGTGCTGTCTACCCATGCTTGGGGTGTGAAGG
GGGAGGGAAACATGGTCACTATTCTTTAGGTCTTGCCTCAGTCCCCATCAGTTCTCTTCCTGTCACAGAGGAGTAGAGAAGGCTGGAGGGAAGGGGG
TGGGCAGTGGCAGAGAGGGAAGGCCTGGATGTGCCCCCTCGTGGGGTCGGTCTGTTGGCCAGCTGCCACTTCTCTCCCCCAGACTATCCTGGACCAC
ATGCACCTCAAATGCAAGTGCCACGGGCTGTCGGGCAGCTGTGAGGTGAAGACCTGCTGGTGGGCGCAGCCTGACTTCCGTGCCATCGGTGACTTCC
TCAAGGACAAGTATGACAGCGCCTCGGAGATGGTAGTAGAGAAGCACCGTGAGTCCCGAGGCTGGGTGGAGACCCTCCGGGCCAAGTACTCGCTCTT
CAAGCCACCCACGGAGAGGGACCTGGTCTACTACGAGAACTCCCCCAACTTTTGTGAGCCCAACCCAGAGACGGGTTCCTTTGGCACAAGGGACCGG
ACTTGCAATGTCACCTCCCACGGCATCGATGGCTGCGATCTGCTCTGCTGTGGCCGGGGCCACAACACGAGGACGGAGAAGCGGAAGGAAAAATGCC
ACTGCATCTTCCACTGGTGCTGCTACGTCAGCTGCCAGGAGTGTATTCGCATCTACGACGTGCACACCTGCAAGTAGGGCACCAGGTAGGGCTCCGG
GAAGCAGGGGGGAGGCTGGGAGCCTGGGCGCAGGGAATGGGGTTGTTTGCCCATCTCGTCTTCTTGACGACCCCCTTCTGTTTCTAAGCTATCCAAG
ACACACAAGTTCCCACAGCCAAAATAGGAAGCTAGGATTTTTCAAGCATCCGTGGGAATGGTCCTTGGGCAGAGACTTGGTGGATTGCACAAAGCAC
AGATAAAAACCCAGTGTTGGCCGGGCGCGGTGGCTCACGCCTGTAATCCCAGCACTTTGGGAGGCCGAGGTGGACGGATCACCTGAGGTCAGGAGTT
CGAGACCGGCCTGGCCAACATGGTGAAACCCGTCTCTACTAAAACTACAAAAATTAGCCGGGCGTTGTGGCAGGTGCCTGTAATCCCAGCTGCTTGG
GAGGCTGAGGCAGGAGGATTGCTTGAACCTGGGCGACAGAGGTTGCAATGAACTGAGATTGCACCACTGGACTCCATCCAGCCTGGGCGACAGAGTG
AGACTCCATCTCAAACAAACAAACAAACAAACAAAAAAAAACAAAATTCAGTGTGTGCACATTAGGTGCCAGCAATTGATTAACATTTTTACACAAG
TTAGTTATGAGCCAGATCAAATTTTTGCATAGCTGCTAGCTGTCATTCTTGAGCATTATTTGGAGATGGGGGGCTGGAAGCTGGGAGACCTGACGTC
TGGTCCTAACTTTGTCAGTAACTTCCTGTTCTTTCACTTTTCTGGGCCTCAGCTTTCTTACTATAAAGTGGTGATGGTGGTGAAGGGCAGGGGGCAG
TTTAAATACCTCAAGCAGCGAGCCAAAATGTCTCCTCTACCCCTGAGGCAGAGTCAGTGTGCATCCACCTTGAACTTAGAGGGCAAGTTCCTGCACA
AGCATAAATCGTACCAACCTCAGGGAGGTGGGTGGGGGGAAGCGGCATATAAGCCCATATCCTGACAGATCTGAAGCTTGGGTGGAGTGGGGAGCAC
TCTCACCGAGTTTATGGATGATGACGGGGAGCAGGAGGGATTCAAGTTCAGAGTGGCTGGGATGAGTAATCGAGGGATCAAAGGCGGGTGGATTTTG
TTCCCAAGCTTCCCAGAGGTGGCCTGCATGGGAGGCGCTATGCACTGGCCCTGGGTTCCACAGCACCCCGGGATAGGTCAGCATGGATGAGGAGTGG
TCCTGGACCCCCGGGGTGGAAGGTTTTAAGGCTGGGGTGCCCTTTCTTCCTTTTCTGTCCCCTGAGAAGGAGCCTAGTGTGTCGAGGCATGAGCATG
GGTGTTGGAATTAGGCCCTGCCCTGCTCCAGCTCCTACCACTTGCCAACCGTGTGACCCAAGCAAGAAATTCTTCATAGACCTGGTTCCTCATCTGT
CATCCTCCCCAGAGATGCTGTGAGGGACAAATGAAAGGACACCGAGGACAGGGCTTGGTTAATTGGGAAGCACTTCCCTGCTGGGTCATTGTTGTCT
GGGGTGCTGCTGGGCGAGAGCAGCCTGTGAAAGGGTAGAGTGCCCCCTCTTCCTGCAGTTCCACAGGGCACCTCTGAGCTACTGGCACATGTCTGTG
CCATAGGGAGTAGGGGAGGGAAGTGGACGGGCCTCTCTGAGATATGGGAGGTACTTGACGTCATGGAGAAGAGCTCTGGCTGAGGGGCGACTCACTC
AGCCCATCTAGGAAGCCCCTCGGTGTAGCTCAAGTTCTGTCCTGGTGGGGACAGTCCAGAAAGGCAGCAGGTGGCACTACCTTTGTCGGTATCTGAA
CAAAAGCAGTGTGGGGAGTGGGAGAGGACGAAGGTGAATCCAGCGCCTCCACTCGTCCACTCAGCTGTCTGGCCTGGGAGCGCCAGTTTCCTCCTCT
GTTCAGTGGTGGTGACAATGGGAGCCCAGCAGAACTTTTTTTTTTTTTTTGAGACTGAGTCTCTCTTTGTCGCCCAGGCTGGAGTGAAGTGCGCAAT
CTCGGCTCACTGTAACCTCCGCCACCTGGGTTCAAGCGATTCTCCTGCCTCAGCCTCCTGAGTAGCTGGGATTATAGGTGCCCGCCACCACGATCGG
CTAATTTTTTTATTTTTAGTAGAGACGGGTTTCGCCATGCTGGCCAGGCTGGTCTTGAACTCCTGACCTCAAGTGATCCACCCGTCTTGGCCCCTCA
AAGTGCTGGGATTACAGGCGTGAGCCACCGCGCCCGGCCAGAATCAGTACTCTTCATCAGCCCTCTTTCTCCCCATTTCTGAAATGGACAATGAGTG
TTTTTTTTCCTCAATCTTATGTAAAGTGCTACATAGATATGGTTTCAAGATGCTGTGTCCAAGTGGTTCCTACCCGGAACCCCTTCTCTGTGGAAGC
TCTGGAGGCCTCACTCTGTGACCAGTGGAGGACACTCTCCCAACATGGTGCCCTTCTGATAAACACTCCCAGGCCAGCTCTTCTGCCTCGCTGAGCC
CTGGCTTCTTCATTTGTGAACTGGGGATGAGAACTGTGTTCTGTGTAGGGTTGTCCTGTGGACTGGAGACCCTGCACATGAAGGGCCTGGCCCAGGA
CCCAGCTGCTCACAGGGCAGCCACAGAGGCTCCTGGGCCAAGCAGAGCTGACCTCCCAGAGCCACCTCCCCAGGCGAGAGCCGCCTGCTCTGGAGCA
ATGGGCCCAGGCTCGGCCGAGACTCCGCTAGGCAAGACGGGAGCCTGCGGGATGCACTGGCAGGGATGGCAGGGGACAGAGTCGTTAGCTGTTCTCT
TGTCTTCCCTGACAGTCTTGGCAGTGCAGGCAGGAGAGAGAAGGGAGTCGCAGAGCAGGCCCCGGGCCCTCCACACGGTGAGGAGAGAGCGCCTGTC
AAATGGCTTGTGTCCTTCCTTTGTGGGGAAAACACCTTTTCTGTAGCTTTTTGTAGCTTTTACCCAGTGTCTCTGGCTAACCATTGATTTGGTGCCT
TACAAGTGCCAGATTTATTCCTCGTCACTCTGCTGTTGTGAACATGGTGAGCTGGAGCTGGAAAGGTTCTGGCAAGAGTCGAGTGGCCTGGCTGCGC
CCAAGTCCTGGATCTGTTACTGCCTTGCTGAGAGACCTTGGATGTGTCCCTTCAATCTGGCTGAGCCTGTTTCTGCCTCTGTAAAGTAGTCTTATCT
TGGCCTTGTCAGCCCCCTAGAAGAGCTGGGGGTTGACTGGGAATGCCTCAAACCCTTTGTGAGATATGACTATGCAAATGAGTAAAATGAACACACT
GCTGCTCCAATGGGAAGGAATTGTTCGTAATTAAGTAGGCTCTCTCCCATTTGGACAGCTCATTATCAAGCTATTTGGTGCGGTACAAAAACACAGT
GCATGCCTGGCGTGAGCCCAGCACAGCAGTTGACTTGGAGTTGGGGACTGGGCCCTCGGCCAGGCACCGTTTCTCCCATCCTGAGTGACCTGCTCCT
GGGCTTCCTGTTGCCCAAGGCCCTCAGCTAGAGGTGGGGGAGGTAGAATTTCGATCCCATTCTGTGGACTCGAAAGCCTTACTGCTCCTGTGACTCA
TACGACCTCCCTCAACAGCAGGCCCAAAGCACAGAGGAGAGCGTGGAGAAACCACCCAAGTCCTCATCACCTCTGAGCACCAGGGACACGTTCAGAT
CCATCAGCAGCCTCTGATCTTTGAACCCCAATGGGTGGTCTCTGGGAATGGAATTATGTTTCTAATTCTTCCTCTTGATTTTCCCCAAGGGCGCTGG
GAAGGGGTGAAGTGTGTGGCTGGGCGGATTCAGCGAAGTCTCATGGGAAGCAGGACCTAGAGCCGGGCACAGCCCTCAGCGTCAGACAGCAAGGAAC
TGTCACCAGCCGCACGCGTGGTAAATGACCCAGACCCAACTCGCCTGTGGACGGGGAGGCTCTCCCTCTCTCTCATCTTACATTTCTCACCCTACTC
TGGATGGTGTGTGGTTTTTAAAGAAGGGGGCTTTCTTTTTAGTTCTCTAGGGTCTGATAGGAACAGACCTGAGGCTTATCTTTGCACATGTTAAAGA
AAATAAAAATGAAAAAAAATTTGACTCCAACAGAACAGGCTGGGCTAATGTGAGCTCTCAGCCTGGCAGTCAAGACATCAGCATGGGCAAGGTTCTG
TTTCCAAACTGCTGCTTCTGGTGACATTCCAAGACGCCTGGAGGGTGGGAGTCAGGAAGTAGGACACACCCCTGCAGTCTCCTTTTCTTGGTCCACT
CCCATTCAAATTTGAGCTAATTTCTCATTCTGATAAAAGCCATAGGTTTAGCTAGGATGAAGTGGTAGGAAGGTCCGTGGCAGTTGTTAGAGTAGGA
TTTGGAGTTTGGAAGAACTGGCAGCTCAGGGTGGCCTGGTCAGCCGTTTGAAGAGCAGCCATGTGTTCTTCTCAGTCTCATTTTCTCTATAACCCTG
TTCTGCACGAGGGGCAGTCAGATCTCAAAATCTTTTTCTACCATTCTGCAGTTTCCACCGTCAATGCAGTTTTTTTTTTGTTTTTTTGTTTTTTTTT
TTTTTTTGGTGGTAGTGGACCTTGTAAATAGGCTATGTAAGGGGGCAAGTCTTCTCTAGCTCAAATGGCTTCCTAAATAAATAAGCGGTATCTTCAG
AAGGGGCCATTCAGTCCTTCCCAGCCCTGCTCACCTGCAGATTCTCTGTACAAATAACTCCAGGTAGAGCAGTTGGACTCCAGGTCACCTTAGTATA
AGTTAGACAAAGGGTCCGTGAGGGAGTAGCCATCAATTCCTGAAATTCCAACTTTGTGACTAGCAGATGGGGAGGATGAAAACCATCCCTTTGCTTC
CTCTCCAATACGGACCCATCTTACTGTGTCCTTTCCTCTCTGGGGCCAATGTGAGTAAACACAGACACAGAGTTCTTTCCCCCAGCTCTTCCTCCCT
CACCTGCATGCTGAGATAGCTTCCATCCATGCAGTTCCCAAGGATCTGGATTAGAAGTTCAAAGGGGAACCAGCAGTCACCTACTCCCTTAGGTGAA
GCATCTCACGGCTGAGTTCTCCCTGAGGCATACTGGTCCAGCTGAGCGTCCTAGAGAAAGCTAGCAAAAGGGAGGCACATGGATTTCACAGTATGAA
TTGGTTCAACAACTGTCTTAGGGAGAATCAGAAAGAAGAGATGCAGCAGGGGAATGAGCAGAACAAAGATTTTTCTTTCTCCCCCTTCTCTCTGGGG
TCTACCTAACCCTGACCTAAAATACCAGGGCAGCGATCTCCCAGCTGGTGCAGGTGGGCTTGCCAAGATGGTCGTCCAGGAGCCCGCCTTCACTTCT
AAATCTGCTGGCCACAAGCCCTGCTAAAGATACACATCTCACCCCCTCCGCCAAGTCTGAAATGCCCCTCCCCATCTCACCTTAGACTGAAAAGTTT
TAAATCATGTCAACTGGATAATACTTGCTTTATGTGAGAATACTTCAGCAGAATGGATACGAATTTTCAAAACAATCTTTTCATATCTATGTATTCT
ATATTAAAAGTGATAAAGTCATGTTTCTGGGGCGTATTCAAGTAGCTGACAAGTAATTATTTAATAATAGTACATGAGTGCATTGTAATGATTCTCG
CCGTAGTCAGGTAATAGTATCCAACCGAAATTTCCTACCAACCTGCTGTATCCAAAGTTTTGTAAAAAGTTGTAGAAGTTGTTGATCTTTTTGATTT
TATATTCAAAAAGTCTCTTTTTATAAATATTATTTATTATACAATGTATATACCTTTGAGTTAACTAAGATTATATATTATATAAATATATATATAT
TTGGAGAAAATATATTTCATCATGCAGTTTTTTTCTGTTAAGTCATTAAAGAGAAGGTAAACAAACCTAAAATGGATACATTGTACACTGTGTGGAG
TTTCCAGATTAATGCTCAGGAGGTCAAGGATACGAGATTCTGAACATGGTGGCCTCAGCTAATTAAATGACCAAGTGAAGGTTATTTCCTCTGTTTT
CTAAGCAAGATCATCAGAGATGTCACGGACAGTGGGTCTGATACACCACAGTACATTTTTAAAGGCTTCTTTTGTTCTAAGTTAACTTCTAACAATG
AATTTCCAGTTTTAGAAAACAACAACTTGTGTACTAATTCATTTCACAGACTCAAGTATTTTCAATGTATAAATTAATGTCACAGGCACTCCTAAAA
GATGTGGCCCAAGGCCAGCAGACCGCAGGGGTGGCCACTGCCTTAATCCCCTCCTCACCACGTTTTCAACTCCATTTAATGGGAAAATAGGATTTTC
TCTATTGAAAATGAAACTTGACTGAAAATTGTCTGTCCCCTGCTAGCTCCACTGTGAGAGCTAAGCCGTAGAGGGAGGTAGGCTGGTCTACAAGAAG
AAAGCGTGTGCCCTGGGCTGTGGGCTGTCTGGAACAATTGTCATTTGAAGTTGGGTTTGGGTTTGGGTAGAAAGGGCCTGCCAGTGGGCATGCTCTG
GGGATGGGCACCCTCTCAGATCGCCACTTCACAGGACCCACTGGAAGCTCACAGGTTATGCCTTCTCAACAATGAGATGCCACAAGTTGGTTTTATG
ACAACAGACAATCCTTTAGTTTTCAGACCTACCCATAAAATGTCACCTTTGGTTTATTCAGCACATTATTTCAGAGAATAACAAAAATGTTTTTTCT
TTTTATTTCTCCTGACCTACCTCATTTAGGAACAAATCTTACCTCACTACGAAGAGAAATAATGAGAACAGGCTGGGTGGGGTGGCTCAGACCTGTA
ATCCCAGCACTTTGGGAGGCCGAGGTGGGTGGATCACTTGAGGTCAGGAGTTCGAGACCAGCTTGGCCAACATGGTGAAAGCCCGTTTTTACTAAAA
ATACAAAAATTAGCAGCTGGGCATGGTGGTGCATGCCTGTAGTCCCAGCTACTTGAGAGGCTGAGGCAGGAGAATCACTTGAACCTGGGAGGCGGAG
GTTGCAATGAGCTGAGATCGCACCACTGTACTCCAGCCTGGGTGACAAGGCGAGACTCCATCTCAAAAAAAAAAAAAAACAAACAAAAAAAAACCAG
GAAAATAAAGCCATGAGCCGCCTATGGTGGAGGCGGGCTGCTCTGCGCTGTATTCAGACCTGTGACCTGAGGTTAGGAATAGCCACCAGAAGTTGAT
GCACTCTGTTTTGTCCATGATGTGTCTTTAGCCCCTGAAAAGCTGAAACCACAAAAACTGTTACACTTCAGCCATACAACGAATCGGACACGTACAG
GATACAGATCTCCTCTACATCTTACAGTCTGGTCATTTTTATTTCATTTCGACTTTTTATTTTTCTTTTGCATAAAGCTAATGCAGGTTGACTACAC
CTTTTCTGAAATGCTTGGGACCAGAAATATTTCAGACTTTGGAAGATTTGCATATATACAATGAGGTATCTTGGGGATGGGACCCAAGTCTAAACAC
GAAATTCATTGATTTCATATGCACCTTACACACATAGCCTGAAGGTAATTTTATGAAATTTTTAAATAATTTTGTGCATGAAACAGTTTAGACTGCA
TTTTGAATTTTGATTGCCACCTGTCACACAAGGTCAGGTGTGGAATTTTCCACTTGTGGCATCCTGTCGGTGCTGAAAAGTTTTAGATTTTAGAGCA
TTTCAGATTTTGGATTTTTAGATTAGGGATGCTCGACTGAACTTATCTATCCCAGAATTCTAGGTACTTTTTCCTTTTTTTTTCTTTTTTTTTTTTT
TTTTGAGATAGGGTCTTCCTCTGTTGCCCAGGCTGGAGTACAGTGGTGTGATCATGGCTCACTGCAGCCTTGACCTCCTGGGCTCAAGTGACCTCCT
ACCTCAGGCTCCCGTGTAGCTGGGACCATAGGCATGTGTCACCATGCCCAGCTAATTTTTTAATTTTTTTTTTTTAGAGATGAGGTCTTGCTATGTT
GCTCAGGCTGGTCTTGAACTCCTAGCCTCAAATGATCTCCCACCTCAGCCTCTCAGCATTGGGACTACAGGCATGAGCCACCCTGCCTGGCCAGTAC
TTTTTCAATCAATAAGATTGCCAAATATTTAAATGGTCCCTATTCATACTAATGAAGACCATTTGTAATCGTATGATTAGTTTTTAATTTTTAAGAG
ACAAGTGTCTATGTCACTCAGGAGTACAGTGGCATGATCATGGCTCAACACAGCCTTGACCCCCTGGGCTCAAATGATCCTCCTCAGCCTCCCAAGT
AACTAGGACTCAGGCGCACTCTACTATGGTAATTAAAAATAAAATCTTTTGTAGAGATGGGGTCTTGCTGTGTTGCCCACTGGTCTCAAACTCCTGG
GTTCAGGGGGTCCTCCCACTTCAGCCTCCCAAAGTGTTGGGATTACTGGGTGAGCCATCACACCCTGCCCAGTCTTATTTGATGGTTAAGGAGAATA
CAGTTGATAGCTGTGCTTGAACATGTAGTTTCTCCTTATGTATAAGTACTTACAAACGTCTAAACACAAGAGGACGTTGTTTAAAAATCTGAAAGAG
ACGACATAATTAGAAGATATCTTTCAAAGCAATATTATTTTATGAAGAAAGAAGGGAAGGAAAGCATGTGAGACAGTTCAAGGATGAGGGGATGAGG
TACAAAGAAAGGTGGAAGGAAAGAAGGTAGGGAAAAAGAAAAGCAAGGAAACATGATGGCGACATGATTCTTGGTGTTACCTAATGCCGTCTCCCCT
GGTGGCCCTGGGCATAGGGACATGTTCTTGTGTGTGTGGCTGGTCTGCACACTCGAGTGAAGTCAGTGCAGCTACGCATTGCTGCTACACTGCCACT
GTTTCTCCTAGTTTAATAGAGAACCTTCTAGGAGGCAAAAATTTCTTACCATTAATCTTATACTCCCAAAATAGTGAGACAGAAGTTGCATGGCGTC
TACGCTGGGAAAATTTCAAACATGATCCCTCCTTGGATATTTTGTCTTCACCCACTTGGGATGCTTGCCAATCACAGGCGCTATCTCCCGCATCTTT
ATGCCATGGTGCCCGTCCAGCACACACCCTTGTGGGCTCGTCTCCAGGACCCAGTCTCAGTACGGCTTGCCAGCTGATGAGAAACTCTACATCATTT
TGCAATAAATTCTGCAACTTACCTGCTTTCTTGAACTCTCATACACACCCTTCCCCAGTCACTTATTTTATTTTTCGAGACAAGAGTTTTGCTCGTT
GCCCAGGCTGGAGTGCAGTGGTGTGATCTTGGCTCACTGCAACCTCTGCCTCCCAGGTTCAAGCAATTCTCCTGCCTCATCCTCCCAAGTAGCTGAG
ATTACAGGCATGTGCCACCATGCCCGGCTAATTGTGTATTTTTAGTAGAGACGGTGTTTCACCACGTTGGTCAGGCTGGCGTCGAACTCCTGACCTC
AGGTGATTGCCCGCCTCAGCCTCCCAAAGCTCTGGGATTACAAGTGTGAGCTACTGCGCCCGGCTGCCCCCAGTCACTTCTTTAAAGAGGCTATGGA
CCAAGTTGTCAGGCAAGGAAAATGAAATCCTGCTTTCACCTTCTGTGTTTGGGCTGGGGTGTTTGTTTATAGCTGACTCACTGTTTCAACAAGTCTG
TTGATCAGGATTTGATTATTGTACACACTTCAATCTACTCCATGATTTTGTGACTTGTTGCTGAAACTTTTAAAGGGGAGGCTGCAATTTTTAGGAT
ATGAAAAGACAGCCTTAAAGTAAAAACATATTTCTGACTTTAACCACAATTATGCAATTTTTCTGTGTGACATTGAAAAAAAGTGTCCCAGTGAAGA
TGTACAAATTTAGAAAGGATAAAATAACCTCCTCTTTTGAGGTTTTGATCTCAAAAACATCTTATGACAAAAAAATAGCCGGTTAACAATTCGCCTT
TAGATGAAGAAACCTAAGGCAGCAGCTAGCTGGAGCCTCCTTTGCTTCTTCACAGGCCGTTCTGTAATCTCATACGCTCTGCTGTACAGCACTGGCT
TTGAAGAATATTTGGGCAGCTTCAAGAACCCACCTTCTCAAGGCTATGCAGGGACCAGGTCGGCCTCAGGGTCCTCCTCCCAGGAACTCCCGTT
HUMAN SEQUENCE - mRNA
GCGCTTCTGACAAGCCCGAAAGTCATTTCCAATCTCAAGTGGACTTTGTTCCAACTATTGGGGGCGTCGCTCCCCCTCYTCATGGTCGCGGGCAAAC
TTCCTCCTCGGCGCCTCTTCTAATGGAGCCCCACCTGCTCGGGCTGCTCCTCGGCCTCCTGCTCGGTGGCACCAGGGTCCTCGCTGGCTACCCAATT
TGGTGGTCCCTGGCCCTGGGCCAGCAGTACACATCTCTGGGCTCACAGCCCCTGCTCTGCGGCTCCATCCCAGGCCTGGTCCCCAAGCAACTGCGCT
TCTGCCGCAATTACATCGAGATCATGCCCAGCGTGGCCGAGGGCGTGAAGCTGGGCATCCAGGAGTGCCAGCACCAGTTCCGGGGCCGCCGCTGGAA
CTGCACCACCATAGATGACAGCCTGGCCATCTTTGGGCCCGTCCTCGACAAAGCCACCCGCGAGTCGGCCTTCGTTCACGCCATCGCCTCGGCCGGC
GTGGCCTTCGCCGTCACCCGCTCCTGCGCCGAGGGCACCTCCACCATTTGCGGCTGTGACTCGCATCATAAGGGGCCGCCTGGCGAAGGCTGGAAGT
GGGGCGGCTGCAGCGAGGACGCTGACTTCGGCGTGTTAGTGTCCAGGGAGTTCGCGGATGCGCGCGAGAACAGGCCGGACGCGCGCTCGGCCATGAA
CAAGCACAACAACGAGGCGGGCCGCACGACTATCCTGGACCACATGCACCTCAAATGCAAGTGCCACGGGCTGTCGGGCAGCTGTGAGGTGAAGACC
TGCTGGTGGGCGCAGCCTGACTTCCGTGCCATCGGTGACTTCCTCAAGGACAAGTATGACAGCGCCTCGGAGATGGTAGTAGAGAAGCACCGTGAGT
CCCGAGGCTGGGTGGAGACCCTCCGGGCCAAGTACTCGCTCTTCAAGCCACCCACGGAGAGGGACCTGGTCTACTACGAGAACTCCCCCAACTTTTG
TGAGCCCAACCCAGAGACGGGTTCCTTTGGCACAAGGGACCGGACTTGCAATGTCACCTCCCACGGCATCGATGGCTGCGATCTGCTCTGCTGTGGC
CGGGGCCACAACACGAGGACGGAGAAGCGGAAGGAAAAATGCCACTGCATCTTCCACTGGTGCTGCTACGTCAGCTGCCAGGAGTGTATTCGCATCT
ACGACGTGCACACCTGCAAGTAGGGCACCAG
HUMAN SEQUENCE - CODING
ATGGAGCCCCACCTGCTCGGGCTGCTCCTCGGCCTCCTGCTCGGTGGCACCAGGGTCCTCGCTGGCTACCCAATTTGGTGGTCCCTGGCCCTGGGCC
AGCAGTACACATCTCTGGGCTCACAGCCCCTGCTCTGCGGCTCCATCCCAGGCCTGGTCCCCAAGCAACTGCGCTTCTGCCGCAATTACATCGAGAT
CATGCCCAGCGTGGCCGAGGGCGTGAAGCTGGGCATCCAGGAGTGCCAGCACCAGTTCCGGGGCCGCCGCTGGAACTGCACCACCATAGATGACAGC
CTGGCCATCTTTGGGCCCGTCCTCGACAAAGCCACCCGCGAGTCGGCCTTCGTTCACGCCATCGCCTCGGCCGGCGTGGCCTTCGCCGTCACCCGCT
CCTGCGCCGAGGGCACCTCCACCATTTGCGGCTGTGACTCGCATCATAAGGGGCCGCCTGGCGAAGGCTGGAAGTGGGGCGGCTGCAGCGAGGACGC
TGACTTCGGCGTGTTAGTGTCCAGGGAGTTCGCGGATGCGCGCGAGAACAGGCCGGACGCGCGCTCGGCCATGAACAAGCACAACAACGAGGCGGGC
CGCACGACTATCCTGGACCACATGCACCTCAAATGCAAGTGCCACGGGCTGTCGGGCAGCTGTGAGGTGAAGACCTGCTGGTGGGCGCAGCCTGACT
TCCGTGCCATCGGTGACTTCCTCAAGGACAAGTATGACAGCGCCTCGGAGATGGTAGTAGAGAAGCACCGTGAGTCCCGAGGCTGGGTGGAGACCCT
CCGGGCCAAGTACTCGCTCTTCAAGCCACCCACGGAGAGGGACCTGGTCTACTACGAGAACTCCCCCAACTTTTGTGAGCCCAACCCAGAGACGGGT
TCCTTTGGCACAAGGGACCGGACTTGCAATGTCACCTCCCACGGCATCGATGGCTGCGATCTGCTCTGCTGTGGCCGGQGCCACAACACGAGGACGG
AGAAGCGGAAGGAAAAATGCCACTGCATCTTCCACTGGTGCTGCTACGTCAGCTGCCAGGAGTGTATTCGCATCTACGACGTGCACACCTGCAAGTA
G

[0298] TABLE VIII

MOUSE NOMENCLATURE
ICSGNM Batf
Celera mCG5742
HUMAN NOMENCLATURE
HGNC BATF
Celera hCG22346
MOUSE SEQUENCE - GENOMIC
GCTAACAGGTACCACATGCTTTCTAGGGACTAAGCATGGTGTTAGGCAATTTAAATATGTCCATTTCTATGATATATATTGCTATTAGATAGGAAAA
CCCAGGCATGGTTTTAAGCGATTGGCTGGCATCACATGGTTACAGAGTGGCAAAGCCAGACACGAGCTTGCAAGGTCAAACTCACAGCTAAAAGACC
CAATTTGCTTTACATTACACTCCCAAAGCACCTCACTCCTGGGAGGTCAGACACCTTTTGCAAGGCCCGGTGTAGACGGGATTCACCCTCCCTGCCA
AGAATAAAGGGCTGGGTGTGTCCCATGATTGCCTGGTTCTAGCACAAACATAGCTTTAGACATGCTGCTTCACTGTTAATCCATTTTCTTTTTATTA
TTGTAGCCTCTTTCACTTTTCTCTGTGGTCTGCACATGGATGTGAGCTCACTCACCTAGGCATGGGGGCCAGAAGTCAACACAGCTGTCTTCTTTTA
TTCCTCTCAACGTTATTTTTAAAATATATAATAGTTGTTCTTTGAGAATTTCATGCATACATACCATGAGTTTTGGTCATATTGGCTCCTCACTCTT
CCTCGCAATTCCTTCTAGATCCACCCCTCACCTTCCTACACCCTTACACCTTGGTGCCTCCTCCTTCTTTTAATAACTCATAAAGTTCAATTTGTGC
TGCCCAAATACACACAATCACTAGAACAAGGTCAACCTACCAGATGCTCCAAGAAAGCTGAGTTTCCTTTTCCTCTGACACTTTTTGTCCCCTTTCC
TGCAACAGTCCTGAGTCTTGGAGGGTGTATGTGATGTAGGTGCCATTTGTACTGAACACTCCACAGCACTTGTTCTCTGTACACTGACCAGTTCACA
AGTGTTTGCATTAACCACCATCCGCTGTACAAAGAAACATCTCTGATGAGGGCCAAGAGCCTCATTAATCTATGGATACAAGGATGCAAACTGAAAG
AACTGTCCATTTATCAAATAATAGTAGTAGGCTCACTTCTGGAGCCTGTGAGTGCCTCCACCATGGGCTTTGCCCAGACTTACAGTACCAGGCAAGA
GTTTTATTCTTTGGACGAAGTCTTAAATCTATTCTGAAAGTAGTTGGGTTAACTCCATAATGGTTGTGCCACTAATACTTAGGTATATTGTGCCATG
TTGGGCATTACTGTGGCTACCAGAATACACAGCTGGGTAANNNNNNNNNNNNNNNNNNNNNNNNNNNNNNNNNNNNNNNNNNNNNNNNNNNNNNNNN
NNNNNNNNNNNNNNNNNNNNNNNNNNNNNNNNNNNNNNNNNNNNNNNNNNNNNNNNNNNNNNNNNNNNNNNNNNNNNNNNNNNNNNNNNNNNNNNNN
NNNNNNNNNNNNNNNNNNNNNNNNNNNNNNNNNNNNNNNNNNNNNNNNTGAGTGCTCTTAACTGCTGAGCCATCTCTCTGGGCCCACTCCCACGTTT
TGGTTTTGGTTTTTTGAGACAGGTATCTCTTTGTGTTGTGCTGGTTGTCTTGGAACTCTATAGATCAGGCAGGCCTCGAACTCACAGCGATCCACCT
TCCTCTGCATCCTGAGTGCTGGCATTAAAGGCATTTGCCACCACTGCCTGCAAGTCCTTCACTTTTTTTTTTATCTGATGGAAGACTAAAATTTAGT
ACCTCTCTCTTGCCTTTTGAGGGGCCTGGGTCCATGCCTTCTGGTCTGAAAGGTAAAAGCAGATTGGAAGCTTCCAGAAGCAACTGAGTGCCTCAGG
AGCTCTGCTGTCAGGTTGAAGACTCTAAAGCGGCTCGGAGCAAGGACGTCATTGGCCTGGCTTTATCTCAAGGAGGAGGAGACAGAGGAGGCCACAG
GCTGAGACTGACGGATGGAGCAGAAGTTTAGGATCTAGGAGCTTCCTCCCTCAGAGCATCTGGTGATGACCAGAGATGTGTCAGATCTTCTCACCTG
GGGTTCTACTGAAGTCTGGTGAGTGGAGGACCAGGGCCTGGCCTGCTAGGCCAGAGACAGCCCCCACAACAAAGACTCCTGTGGCCAGAAGATCACA
AAAACTGCCCTTTTCCTTTTCTGCTAGCCTCACGAAGAGCCAGCTAATGATGGTTTCCTGCAGTCTTCATCTAGGCTGAAAAGGCAGGGGACCAGGC
TACCGGCCACTGCAAGGGACTTTCCTCACCATCACCTGGCCATCCCCTCTGGCCCCTTCCCTGGAGAGCTCTGCCCTCAGGTAAATGTTTTCTCAAC
TTGTTTGGGGAACTTCGTAAAAACTCCCCGCTAGCCATCTCATAAGCTGTGAAGGTGTGCCTTAATGTGCTTTTTTCCACTAAAAAGGTTTGTTTAA
AAAAAAAAAAACTAGAGCAGCCAGGGGATTTTTATTATTTTTTTTGTTCAAATAACTAAATAGCAGCCCATATGAAGACTTCAAAGTTAACACATCT
CAAGAGTATCCCTCAAAAGGGAGCTCAGAAAAAAAAAGCGGCAGAGTGGGGGGTTTAAATGTCGTGAATCAACTCATGGCTTAGACAGGAAAAGTTG
GTAACCTGGGCGGTCTGGTCTGCCTCAGGAAACAGCCAGACAAGGTTGGGCATCAGTGCATGGGAGCATGGAAGGAGCCTTAAACTTCTCCCCTAGC
CGGGAACCAGCAGCCTAGCCTCTGGGGAGCCGGGGTCATTTGCATGCGCTCTTAAGAGACTCTTGCTTATAATTCCCTAGTGTCATCTTTAGTAACT
AAAGGGGTTTCTAGGGAATGGGAGGCCAGTGCCCCGGGTATATGAACTAGCCTAGCCACCTGGTTCAGAAGCACCAGTGAGAGCCAAGTGGGAGTGT
AGGAGGCCTTGGTGCCTGGAAGTTGCTAGATAACTTGAGGCAGATGGTGAGAATGGATCACTGTCTACTTGAGACCTTTTAGGCAGAAGAGTTTGAG
GCTGTGGGTGCTGATGGGACCCAGTGAGTCAACTCTTGCATATCCCCAGAGAGTCAAAAGATAACAGAGGCCAGTTGGATCTCCTCCTCTTGCTGAG
ACACTAAGCTGGCCCCTGAGGTCACACACTGTCCCCTACTGGACAATGTGTCCAGAACTTCGCATCCAACAAAGGGCCTCATGAGTGACCAGCATTA
GGGGTCAAGCCAGCATTTCCTTCCTTCTCCCTGGCTTTGGGAAATGTCCCACCGCCTTNNNNNNNNNNNNNNNNNNNNNNNNNNNNNNNNNNNNNNN
NNNNNNNNNNNNNNNNGCACCTTCTCCACAGTCAGCCCAGGCCCACACCCACACTATGTTGTCCTGGGTTTCTTATGTGACTGGAGCCTCCCTGACC
TTGTCAATCACCAGCTAGAGGGAGCCCAAAGCCTGTGAACTGAGTTGATAGTTGGATGTTGCAGTGGAGCCTGTCTTTATGGAAACAGGGAAGAGCA
AAGATAGGGCACCTGCGCTGACATGAATATACACTGTTACACTTAAAAAGCAAAACCAAAGAGACCCTGTTTCGGATGACCTTAAGAAACCCCTGTG
CAGGGCTTGGAAAGAGGGCTCAGCAGTAAAGAGCACTCCTTGTTCCTGGTGAGCTCCCGGCATCCATATGATAGCTTACAACTGTCTGTAAATCCAG
TTTCGGGGGATCCAATGCCCTTTTGTGACTTCTGCAGGCATCAGGCATGCGTGTAGTGCACGTACACACGTGTAGGCAAAATAGCCGTACACATGAA
AAAATAAATCTAAAAATATTTTTAAAAGACAGAAACCATTTGCGTATGGTATATTCTGCTGATCTGAAACAAGGTTGATCACTAGGCATTCCAATGC
CTGCTATGGAAAGACTGAAATACGGGTTGTCAGTTTGACCTTAGCCCTTAGAGTTTCTTCCATTTTCTTCCTACCTTATCCATTCTCCTGAAAATCA
GCAACCAAATCACTACTGCCATGGCTCAGAGGAGCTGGAGTCTGCTCCGACCACTGAGGGCTCACCATGGGACAAATGGACAGACAAGTAGTGGTCC
CTGATTGTACATCATCTCTGTTGCTCATGACAACAGCTGCCTGGGGCTCTCTGCTTATCATATTCAGCTGGATCCCTGCACATCGGCTTTTAATTTC
ACAAGTCTTCATCATGTCCTCCACGTAGCAGAAAATGCTCTAGAGGATTGTACACTATAACTCGTTTGAGTCTTGGAATAGCCTAGAGGAATTTGGG
ACTTTCCCTTTTGATAATTAGCCAGATGTGGTGCAGAGGTGGGCCTCCAGTGTGGGCTAGCTCCATCATAGAAAGTATCACCAGGAGGGTCTGGCGT
TATGGCTCAGCTGGAATAAAGGTGCTTGCCACAAAGGCTGAGGACTTCAGGTGATCCACGTGGTAGAACGAGAGAATTAACTCCTCCCAAGCTGTCT
CCTGTGACCTCCACACCCACAGGGCACACATCACCTACACATACACACACTCATATATACATTAAGACACCATGACCAAATGTAACTCTGGGGGGAA
AGGGTTTGTTTGTTTCCTTTTACAGGTTGTAGTTCTTTAACCAGGGAGGTCAGGGCAGGAACTTAAGACAGGAGCCTGGAGGCAGGAGCTGAAGGAG
ATGCCATGGAGGGGGTGTTGCTTACTGGCTTGCTCTCCATGGCTTACTCAGCTTGCTTTCTTATAGAACCCCAGGGTGGCACCACCCACAGTAATCT
GGACCCTCCCACGTCAATTATCAGAGGAGAAGATGTACCCCAGGCTCGCCCACAGGCTAATCTGGTGGGAACTTTTTTTTTTCAGTTGAGGTTCCCT
CTTCCCAAATTACTCTATCTGATGTCAAGCTGACATAAAAGCAGCCAGCACAGTCAGGGTTATAAAGTCAGCAGAGGGGACAGCCAGGAGAAAACAC
GCTACTGCCTTTGACTCCCCTTTAGCTGCATCTGATGGAAATTCCCCCAGACATTAATTTGGGGAGTATGGTGGGCTTAAGAAATGTCCTCAAGTAT
TGTGTGTGTGTGGGGGGGGGGGGAGGTGTTTCTCACTATGTAGTCTTGACTGGCCTGAAGCTAGCTATGTAGACCAGTCTGGCCTTGAACTCATGAA
GATCTGGCTGCTTCTCTACCCCCACCTCCACCCCCAAGTACTGAGATGACAAGCACGTGCCACCACAACCAGCCAGTCTTCAAATTCTTTAATATTC
CTACCTTAAATAGGTGGGGGTCTTAGCCTGTGGTGGTATACACCTTTAAGATCAGCACTTGCAGCTGGGCGGTGGTGGCGCACGCCTTTAATCCCAG
CACTTGGCAGAGGCAGGCGGATTTCTAAGTTCAAGGCCAGCCTGGACTACAAAGTGAGTTCCAGGAAAGCCAGGGCTGTACAGAGAAACCCTGTCTT
GGGAAAAAAAAAAAAAAGACCAGCACTTGGGAGGCAGAGGCAGGTAAATCTCTGTGGGTTCAAGGCCAAACTGGTCTTCATAGTGAGAGTCTGTCTC
AAAACAATAACAGAGTTTGGAGAGATGGCTCAGAAGTTTGGTTCCCAACATTGATGTGGTGGCTCACAGTCATCTGTAACGCCAGTCCCAGAGAATC
TGGCGCOCTCTTCTGGCCTTGTGGGTATTGCACACACATGGAACACAGACACACATGCAAACAGAAACACTCCTACACATGAAAATTAATTAATTAA
TTAATTAATTAATTTTTAAAAAGATTGAAAGCAATAACAAAAGAGGTGAAGTCTCTTTAGTCTCCCCTTAAGAGTGAGGTGTTAGTGCTTTGCCTGA
GAGTAGCAAAGCAGAAGAGAAAGGGGACTGAGACATAAATGGCTCCCTCTATTAACAGCCATGTGGGGACTCCCACTTAGAAGTGAATCTCCTAGTT
CATCAGGACTTCAGATGACAANNNNNNNNNNNNNNNNNNNNNNNNNNNNNNNNNNNNNNNNNNNNNNNNNNNNNNNNNNNNNNNNNNNNNNNNNNNN
NNNNNNNNNNNNNNNNNNNNNNNNNNNNNNNNNNNNNNNNNNNNNNNNNNNNNNNNNNNNNNNNNNNNNNNNNNNNNNNNNNNNNNNNNNNNNNNNN
NNNNNNNNNNNNNNNNNNNNNNNNNNNNNNNNNNNNNNNNNNNNNNNNNNNNNNNNNNNNNNNNNNNNNNNNNNNNNNNNNNNNNNNNNNNNNNNNN
NNNNNNNNNNNNNNNNNNNNNNNNNNNNNNNNNNNNNNNNNNNNNNNNNNNNNNNNNNNNNNNNNNNNNNNNNNNNNNNNNNNNNNNNNNNNNNNNN
NNNNNNNNNNNNNNNNNNNNNNNNNNNNNNNNNNNNNNNNNNNNNNNNNNNNNNNNNNNNNNNNNNNNNNNNNNNNNNNNNNNNNNNNNNNNNNNNN
NNNNNNNNNNNNNNNNNNNNNNNNNNNNNNNNNNNNNNNNNNNNNNNNNNNNNNNNNNNNNNNNNNNNNNNNNNNNNNNNNNNNNNNNNNNNNNNNN
NNNNNNNNNNNNNNNNNNNNNNNNNNNNNNNNNNNNNNNNNNNNNNNNNNNNNNNNNNNNNNNNNNNNNNNNNNNNNNNNNNNNNNNNNNNNNNNNN
NNNNNNNNNNNNNNNNNNNNNNNNNNNNNNNNNNNNNNNNNNNNNNNNNNNNNNNNNNNNNNNNNNNNNNNNNNNNNNNNNNNNNNNNNNNNNNNNN
NNNNNNNNNNNNNNNNNNNNNNNNNNNNNNNNNNNNNNNNNCCCTGATATTTATTATTTTTAAACATAATTATTTTAAAGTAATTTGTTAATATTCC
ATTGAATGAGACCCCTCCTTCCATACAGAAGACATCATTTGTATTTCTCTTCTCACTGGTTCCTAGTACTTAAACACTGTACTGACTCGACATCATT
GAGTCAAAGCCACCACTGACTGCTGAGTGATAGACTTTTCAGAGCTAAGAACTTTGTGCACATTATAACTCATAACTACTTTGGTTGTTGGACTATG
CTTTTCTTTCTATGAAAGCAGTGTCTCTGTCTTGCTTATACTTATGATTCTTGATTCTTGTTACAACACATAATAGGTGGGAAATCTGTCGGGTGAA
ACTAAATGCAATATAAATAAGATCATTATAATCCTTAAGGGGTTTTTAATATACTTAGGTTTAGAGAAGATGCAAGTCGTAACTTCTAGTTGTATGG
GAGCTTAGTCGGACCTTATTCAAACAGCCCTTTATTGGGTGCCTACTAGGTACCGGACATGGAACTGTAAACATGAGACAGTCTTCAGCTTGAACAG
GGGCCACATCTCACCACCTTCATCGCCACCTCTGTGATTCATGCTACCAGTATCTTTTCTTTTGTTTAGGACAATGAGATTACAATGTTAAACCCAA
CATTGTAATCCTAACTGGTCTTCCCTCATTCACTTTTCTCCCCACAGGAAAATCTCAACTGTGTCTAAAGGGATCCCAGGATACTCCAGTCAGAGCA
TGTAGTTCCCCTGCTCTCACACTACCAACGTCTGCCCACCTGGGGGAGGCAGCAGGCTTGACCTTACAAGTCTTCAACTGGGTCTGAGTCAAGAGGT
GGACTGTATCTTCAGCCCACTGAACATTGAGCGACTTTGTGACTTTCTTTGGTCAATAGGATGTGGTAGATGGGACTCTGAGCTAGACCTGATCATG
GATGTTGGCAGGTTCTGAGTTCTGCCTTTAGAATCCGGCACCTGCCAAGGGAACAACAGGCAGGATGGCTGGGAGGGTGGGGTGGGGTGGGCCAGGG
AGAACAGACCAGTCAGTTACCAACCAACTCAGCAGCTGAGAGGTCTGGATGAGATCAGAGCTACTGTGGCCTTCTGGAATCTTCTGAATGACCTACA
AACTCAGCCAAAAGCATGCCTGTTTAAAGCTCTCGTGAAGTCCTTGGTATGTTACACAGTGGAAACTTACTGATAAACTGTCTCGTTCAGGGGAAAA
AGTCAAGTGTTTTGCCTGGCACATGGTGGGTGCTCAGGGGACGCTTGATTAAATAAGAAATTCCCAAATGCAGTTTGCCTTCCAGTGAAGAAAATAA
GTTCTAAAACAATCAGCGGCTACGATAAGTGCTCTGAAACAAACAGGCAGTCGCAGTGGCTAGATCTGAGGATCTAGGGAACGGGGCACGGGCCTGT
GGTTGGTTCTCTGGTTACTTTAGAATGAGGCAAAACTCCTCCCAATTGACTCCAAGAGCCTTGAGAGACGTCCCGGCTGATCCACGTACCGAACTTA
TCCCCTACCAGTCCCCTGCCACTCTCAGGACCTCTGATCCGGAGACACTGGGCTCTCTGGTGTTCCACCTCAGGTGTGTGCCTGGACCTTTCTTCAC
TTAGCCTCTCTGCTCCCCCTCAGGTTCCTGCTCACGTGTGACCCCTTCACCAAGCCCTTCCTGGCCAGCTTACAAAAGTGGCCACTCTTCGAATTCT
CCTACCCTGCTCTATTTTTATCTGTGACACTTGACACTCCCTGATGTATTATGTCAGCTCAGTTGTTTTACCTGTCTGCTCTCACCACTAAATACAA
ATTCTACAAGGATTGACTTTTATTATTATTATTATTATTATTGTTATTGTTATTATTGTTATTATTATTATTTTGATAGGTTTGTCCTTAGAACAAT
ATTGTCGTCAGGCAGAATTGTAATCAGTGGATACAAAAATGCTTTAGGAGCCATAACATATTGTCAGCCCTCAGATTAATCGAGGTGAGCATTTGAG
CCACACTGGGAATAGAGTAAGAGCTTTTATTTTAATATGTGTGCGTGTCTTGCCTGCACATATGTATGTGCCCCGTGTCCATTTCCTGGTACCCGAG
GAGTCAGGAAGAGGACCCCTGGAACTGGAGTAACAGATGATTGGGCCACTGTCTGGATGTTAGGACTAGATCCCAAGTCCTCTGGACGAGCAGCCAG
TGTTCCTAACTGCTGAGCATCTTTCCAGTCCCCAAACTTTAAAAAAAAATAGCCAAAACACTGGGATGAGAATGGGACTGTTCACTAAAGCGACAAG
CGTGTTCGTGTCATGGGACACATGCCAAACACCGCCACTCCACAGCATGCTTTACAGAGTGGGGGACATTCCTATTCAAATTGTCATCCCTCATTGC
AGTAGCCCTGAAAGGTAGTAGGTGGGGCAGGTTTTAGGTGTGTGTGTGTGGTGGGAGGCTGGGGGGGGGGGGAGTAAGGGAAGGGAAGTCACTGGAT
TCTCATCATATCGATCTGACTCCAAGTCCAGAGCCTCTGTCCCTCATTTTGACGTTCTCTCCTTGTTGGGTTATGACGTCACTGACTTCTGAAGACT
CAAGGTCAACCTTGAACTCCTGAAGGAGCCCCTCCACAGAAGGTAGGTATCCTTTCTCTAGGGAGAATGAAAGTGTCTTGCTAAGAGGACAGGGGAT
AGATAATAAACTTCTTTAGCATCGATTCCAGAGACTCCCCGAGACTCTCAGCTAGCCCCAACGTCTTGCTTGGTCATCTGTAAAAGGCAGTGCCCTC
CTTTCTTTTTGTCCCCAGCCCACCGAACTGTCCTATAGGTGAAGGAGGAAGGCCGGTCATAAAACAGGATGGGCAGTTGCTTTCGGGTGAAACCCAG
AAAGGGTCCTCAGGCTTGTCGCTGACTGTATTTAGATTTAAAAATCAAGGCCTGTGACCTGGAGGCTCTTTCCTGCTGCTCTCTGCCATGTTGACAG
CAGAGAACTTGCTAATTCTGGCCGGGGATTTTCCCTGTGTGGCTGTTTTTCTTCTTTATCTTCATCAATTGAAGAGCGCTCGCTCTGCCTTTCAAAC
TGCCTGCCGGAAGATACTGGGGGTTTGTGTATTTTTTTTTCTTTCACCTAATTCTGTGGTCTTTTCCCAGATGTGTATTTTCTCTCTACCTTCTTTC
TAACTTGTTGACGTTTCCGCCCATGTGACTTCCAGCTTGAATTACCAGAAACCACAAGAGAGGGCCTGTGCGCAAGCCCCAAAGCAGCGAGATGTCC
CTGTGGGGAGCAGTCCCTCTGCACCCGAGAGAGAGGAGGACGCAGGGGTCTGTCAGAGGTTGCTGTTGGGCAAGCAGGGGAGGTACCTGTGGAAGGT
GGTGTGCTGGTGGCCCCCTAGCAGTCAAGAAGGGGAGCCAGCTAGTGAGAAGATCGCCCAGAGGCATCTGGGACGGTGTGGGAGAGCCCGGAAGATT
AGAACCATGCCTCACAGCTCCGACAGCAGTGACTCCAGCTTCAGCCGCTCTCCTCCCCCTGGCAAACAGGTACCCCCTTCGTCCCCCTCCCCCACGC
CCCGCATGCCTTGCCTTCTGATTTTCCTGGGGTGGTAGAAGAGGGGTAGGCTCCCTTGTCCTGCCCAGGGAGCTCTGTCTGGGGAAGGAAGTAGCTC
GTGGCAGGAACTCTCTAGCAGACTCTGGACCGTGTGGTGTTTGCTATACAGAGGTCCAAGGGCTGAAGCTTCGCATCCCGCCACAAAAGCCTCTCTT
TCCAAGAGGTACCCCTCGTCTCTGCCACTTAGGTTCCCACCGTGAAACTTTCTAGGAAGCTGGGGGCAGGGTGAATATCACAGAGCTTAGAAGTATG
GTCAACCATAAGCAGAGGAATGTTCCAGTAGATCGCTGCTTCGGGCTCCACCCAAATCCTAGAGTTGTAGCTTTCCAGGAAAAAACCAAGCAAGTGG
CAAGACAGAACCGAGGTCAGGGAAGAGAAATATAGCAAATCAAAGCAAGGTAGACAGGAGGAGAAGAGTGGCAAGATCTGCCTGCGGATTGCCTCGG
TAACTCCAGCAGTCCGTGGGAAGGGAGGCTAAAGCTACAACCTGTATCTTTCCCCCCCACCCCCCATGTGGCTTCCAGATAGAAGAAAGAAGGCCAT
GGTCCAGGAGGCGTGTCAGAGACTTTCACTAGTAGCTAATATCATCCCTGAAAAACCAGGGATGGAGGGAAAGATTCTGAGACTCTTAGACTCTTGA
CTGATACCAAGCCGAAATGTCTCAGACTGAAAGATGCCTCCGATGGGATGCCTTTCTCACCTTGTGGTTTCTGGGTCTCTCTACCACGTTCCTGATG
CCCCTTGTTCTAGACATTTCTCCTCCTCATCCAACATAGACCCACGGATTAAACTTTTTTACATCTCATCTTAAAAACTATATTCTTTCCTTAGCAC
ACATATTGGGAGGGGCTCAGAGGTAGAGTGTTTGGCTCACACACATCCAGGGGGCTGCAAAACGCTACAAACAAAATAAACGTAAACTACCTGACCA
CCGGCTCCCACATCTGTCACAAGCCCTCACCAAAAGCCATACTGGTGAAGACCTCAAGAGGGAGATAGTCCCTCGCTCACGATGGTATCAGAGCAAC
TCAGACTGCCTGGAAGATGGTACCCCAGTCTCTTCTTAAGAAGGAAATTACTCACAGCTTCCATGGCAACCTAGTCCCTTAGCACATTAAAGGAAGA
ATATATCCTTGCCCTCTCTAACCCAATGTCCGTTTGCTAGAATGACCTGGAAAGTTTGAGTAAAGAGGGAAGGGAATCAGAACCTGACCCAAGGGTC
TTTGCCCCTCAGGCCAGTGGAGGTAGGTGACAGGGTGGGGGTTGCAGAAGGGCTTCTCTTCCCTGATCTTCTATAGGAGATACTTAGAAAGCACTCA
AAGAGCACTGTGTCCTCCAAAGCACCCGTCAGTGGCTCACTAAAGCAGGCGACCTGCACTTCATAAAATGATTTGGTGGTGGTGGTGGTGGGGTTAC
CTCATCTGTAGCAGGCATCATGTTCAGGACTAGGAAGGTCTCAAGATGTCTGCACAATGATGGACCGAATAAAACAGATCTGGGCGGCGCCCTCTGC
CTAGGGGTGCAGCACAATGAAATTAATAGTCAAGGGGGAATTCTCAGAAAGGATTGAGCATCAGTGCCAGAAAGATGTCATACCCCTGGATGTCCAT
GAGCTCAGGGATCAGGGTGGAGAGCCTCAGCTTCGTACTGTGTAAAATAGAAAAGACGGTGCCTGCTCAGAAAGCTGGGGAGTTGAAGCATAGCGTC
TCCGAACGCGCTTGTACAGAAGTTGGCACATGGTAAATGCTCAGCGGAGTTTTCAAAGACAACAGCAAAAGGAGCATCAAGAAGGTTTAGCATGTGC
GCACACATGCACATATATACATGCACACACACTCACACGCACACATACCTCACATGCATACATATGTATACACACATGTACACACACACACACACAC
ACAGAGTGAAGCTAGAACAGCTCTGGAGAGAGCAGAAGTGATGGCATCTTAACTGGAATTTCCCAAAGTAGCCCTCCTGAGGCTTCAATTTCTCTTC
ACTTTTGAGTAGCTTTTGATCATAAGAAGACCATAGGAGACCCAAGGGTGGGTAGCAGGGAATGCTGAAGAAAATGTCTTTGGGTACAGGCCTTTTG
TAAATAAGGGGAATGGACAATACAGAAAGAACTGAGGACCGGGAAGGAAGGAAGGAAAGGAGGGAGGAAACCAATGTCCTATTTTGACTAAGAGGAA
CGATCAGACCTACCGTTGATATCTCTGCTTCCTAGGACTCATCTGATGATGTGAGGAAAGTTCAGAGGAGAGAGAAGAATCGCATCGCTGCCCAGAA
GAGCCGACAGAGACAGACACAGAAAGCCGACACCCTTCACCTGGTGAGTACCCACACTTCCTACCATGCTCCTGCOCTTAGGCTCTGCGCCCCACAC
CAGTGAGGCTGTGGGGCCCAGCTCTGATGATTCTGCTGTGGTAGAGCTAAGTACTGGGGGAGAGTAGTAGAGGGCAAGAGCTGCAGGGGTCAGGTTG
TGGAAAGGGCTTCGCTCTCCCATGCATGTATGAAAACATTTAGTAGCAGAGAACAGCACTGGACACTGAACCTTTCTGGCCCAGGAGAGTGCAAGGG
TAGATGTGTGGGATGTTGACAGCCTCAAGGCTTCATGGGAGGCAGAGCCACCTGTGTGGAAAGGGACAGCAGAGAGGGTGTCGTCCTTCCTGAGCCA
CTGTGAGCAGAACACTGATGCTGAGAGGAAGTTAGGTGTTAAGTGCTTCAGGGAAGCCATTCTTTCAGAGCTGCACATCTCATCCCTCTGGAAGGCA
ATGGTCTGCCACCCAAGCACACTTGCCTTTGGGAGAAGGAGGTCGATGATGCTGCCCTTATTTTTTTTCCCTGAGCATGGAGAAAGTTCTGTGTTGA
GATTTACATTGTTAATGGTCTCTCTAGGGTCTGCTAAAGACAAAATTTTAAAGCACTTACTTGGGACAATCACCATCCTGGTCTAGCAGGGAGGGGA
TGAACTGCAGCCTCACTTGGGAGACCCAGGGCCTGGACCAGCGACCCCGAGTCCTGACTGGGCGCAGTGTTCCCACCCTTCATACCTTTCCTCTTTA
CAGTCTGCTCCTTTCACTGTGTTCTTGCTCAACTGTTCCATCTTCATCGCATCCTTCTTCCTGCTCTTCCTCCTTCCTCCTGAAACATTTCCAAACT
GCTAATATTCTAGAAATTTCCTAAAAGTGCAAGAGGTGCCAAACCCAGATAAGCTGATAATGATCTGATGTTTAGCATGGCTAAGGGCTGCTTTAAT
TTTATCAGGGATAAATTATCGGGGGCTGGGGAAATGGCTCAGGGGGTAAAATGCTTGCCATTCTAGCATCAGGGTCAGAATCCCCAGAACCCGCATG
ACAGTCAAATGGGCAAGAGGCAGAAGCAGCAGGTGGACATCTATGAAATTGAAGCCAGCATAGTCTACACAGTGAGCTCCAGGATAGCCAGGTCTAC
ATAGAGAGCCCCTGTGTCAAAAGAGAAAAAAGAAAAAAAAGAAAGAAAAAAAAGCTGAAAAGCTTAATGGATGTGGCAGCCTGACAGTGTAATCCCA
GCTCATGGGAGGTGGAGATGGGGAATCTTAGAGTACGTTGGCTAGCCAGACTAGTCAAAACAGTAAGCTTTAGGTTCAGCAAAAGACTCTGCCTCGA
TTCTCAATACGGAAGTTGGAAAGTGATGGGAGAAGATACTGACCTCAACCCTGGGCCTCACACACGCATGTGCATCTATGTACACGCGTGCCCACAT
ACAAGAAAAATACATGGAAACACCACACGCACATACACATGCAACAAAAGAATAAGTAACATACAGTTTTAGAAGACAAAGGGGAGGATATCGCCAC
TTCTTTCAGCCTAAGGACAGAGAACGGTCTGCCCTAGTCGCTCTGCCTGTGCTTCTGCTCTGTTTGATAGGTTCTTAATATAGTCTCCAGTACGTGC
TAACATCATTTTCAATTGGCAAATATGTGTCAGACTAACAAGAGAAAGAATAAACAGCACTCAGCACAAACAGACCAACAGTCTGAGTGTTCAGTGT
CTGTCCCGGTACTCAAACCCTTCAAGATTTCCTGGGGGCTTAAAAATCTCACACTATCTGAAACTGACTTTTTCTATCTGAGTCTGGTTCTTAGTTA
ATATTCCATAGAGCAAGAAAGCCACACTTACGATAAACTCCGTTTTGTTTGTGCAAGTAGACAATGTCCTAGATGGGCAAACTCCTGTAAGCTTTGT
AAGTTTGTAATATTAAAAGAAGGAAGCTGAGTTCAGCCTCTCTCTGGCAGGGAGGCCAGACTTGAACCACCGCTCTGCCGACTGCTGTCTGTGTGTC
TGGACCCACAAGCATTCTTCATGGTCCTTAGCCTTGGGGCCCTTATCTATAGAATGGGAAATGACAGGAACTGCTTATAGAGACAGTGCAGGAGAAA
AGCTCAGTATGGTGCCTGGCATACAGTAAATACTCAGAAGATTCTGTGCAATTAAAGTTATAGTAATAGTGTAAGAGGCGTGAAAACTGAGACTGAG
CAGGCATACATATGTACATTGCATAATTTTATATAAAAATGTACGTGTATTTCCCAGTATGTATATATGCACATATTACATGCATGTATTGTGTGCC
GTGTGTATTGTGTGTGTATCTACCATGTGTGTGTGTGTGTGTGTGTATCGTATGTATGTGAGTATGGGTGTGAGTGTGTGTGAGAGATGCATGCATA
TGTGTGTGTGTGTATACTTTTTCTCCACATCATCTCAGTGCTGAGAGACTTCTTAACAGCTGTAAAGCTCATGAGACTCCCTTGCCACACTCACTCC
CGGCAGAAGGTCCCCAGGGCACGCCCAGTCACCTCTAATAGCAGAGTGCTGCCTCCCTCTTGACACAGGAGAAGGGCCTCCTGTCTCTAGCTGCAGG
CCACCTTCCTGTAAACTCAGCCCCCTGGTCTCTGTTGCCTAACTTCTTCTGTGAGAGCATGAGAAACTTACAATGAAGCATTTTGAATACCTGTCTT
GTATTCATGCATGGCGCGCTGATTGTTTTTTAAGTGACAGAGGTGGGGAGGAGCCTCCTGCGACAACTGTGTTACAATGTCCCCAGCATTGATTAAC
TGCACATAATTCATTTGTGATTCTGTTCCGATTATGAGATATACGTGATGGTTTCCCAGACACAGATGTAAACATAAGATAATTAGGATGGCATATC
AACCTAGTCAGAGAGGTCGAATTATCTAATAAATAGAGTTGGGACACCTGGCAAGTCACTTGAAGAGACAAAAGGCCAGGTCTCTCATTCCTTATGC
AATGCACAGACAGTTTAAATATTTTTAAAGGAAACTAAAGAAGTCTTGGGGGAAAATATGTAATTTGGAAATGTACCTTGGCATGAIAATTTTTCAA
ATAAGATAGATAGAAAATAATAAAAGAAAATTGATATACAAATGTGATTTATACATGCATCAAAAAATAAAAAAATTTGGCTGGGCATCCTAATTGG
GCTAGGCCTTCAATCCTAGCACTTGGGAGACAGAGGCAGGTGGATCTCTGAGCTCAAGACCAGCTTCATCTACATAGTGAGACGCCCATCTTGAAAA
AAGGATGAAGTTTACCCCCCCTCTTTCTTCCTTTTCTCTCTCTCTCTCTCTCTCTCTCTCTCTCTCTCTCTCTCTCTCTCTCTCTCTCCTTCCTTCC
TTCCTTCCTTCCTTCCTTCCTTCCTTTCTTTCTTTCTTTCTTTCTTTCTTTTTTTTCCTTCTTTCTTTCTTTTTTCCAAGACAGGGTTTCTCTGTGT
AGCCCTGCCTGTCCTGGAACTCACTCTGTAGACCAGGCTGGCCTCAAACTCAGAAATCTGCCTGCCTCTGCCTCCCAAGTGCTGAGATCAAAGGCAT
ATGCCACCACTGCCCGGCTGAAGTTTTTCTTTCATTCTTCAAAATATTATATACAAAATCAAAGGCAAATGGAAAGCCAGGAGGGAATCATCTAGAA
AATTCATGAGCCAGAAAGGCAGGTTTACTACATATGTGGGAACTCTATGGCGAGGGAAATGATTGATCTTTATTAAAAAAAAAAAAAAAAAAAAAAA
AGACTATAAAGTGAGGGAAAGGGAGAAACAGAATGTACCTACACATGTAAGGATGCGCCAGGCCTCCTTGGGAAAATGCCAATGAGGGTGAATGTAA
GACTTCCTTGCCAGGCTGACAGAGGTGAAAGATGGAGCTGACCCAGGAAATGGCCAAGGGAGACGGAGAGTGAGCATCGCATTCCCTTAGCAGGGCA
AGTTGCTATAACCCCCTAAGACGGCAGCTTGAGCAGGCTCACTCAGGTGGCAGGGGCACCTCCCCTGTCTCCCAGCAGGGTGCTGTCCAGAATCCGT
CCACACCACAAGCACAGCACAGAGGTTGTAGCTCTCTGAGCTGAGTGTGAGTCATTGTTGCGATGTGCTGCTCTTGGTGTCTCTTGGTTTTTGTTTA
GTGGCACTGGGGATTGAACCCAGGGACTTGTACACCACTGAATGACTGGAAACTAGTTACATATTCATTAGGAGAATGGGGGTTGAATGAACACTAT
TGGTCCATTCTGAGTGTGCTGTTATGGGACTGTTAAGTGAGTTGCTTCTGAGTGTGGTAAAACTATCGTTTTCTTTTCTAAAACAGTTTTTCTAAGT
TATGGAAGGTGGGGTATGTGTACATGAGTGCAGGTGCCCATAAAAGACAGAAGGGGGTATTGGTCCCATGGCCACAGGTACTAGAAACTGAACTCGG
GTCCTCTGCAAGAGCAGTAGATGCCCTTAATCACTGAGCCATCTGTCCAATTCCTCTTTAAAGCTTTCTATGTTGCAGTTATTTATTGTTTGTTTGT
TTATTGTGGGGGAGTGCATGCATGTGTGGATGAGTCGGTTCTCTCCCTCCGCTGTGTTGGGTCCGGGCATCGAACTGAAGTCATAAGACTTGGCAGC
AAGCAGCCGGGCGTGGTGGAGCACGCCTTTAATCCCAGCACTCAGGAGGCAGAGGCAGGCAGATTTCTGAGTTCAAGGCCAGCCTGGTCTACAGAGT
TCCAGGACAGCCAGGGCTATACAGAGAAACCCTGTCTTGAAAAACCAAAAAAAAAAAAAAAAAAAAAAAAAAAAAAAGACTTGGCAGCAAGCACTCT
CACCCCCTGAGCCCTCTTACCGGTCCCTGGTTCCCAGACTCTTAAGGAAGAAAAGTGCAAATGTAGCATCTAGCTTGCGCCAAGCCACACTTTTTAA
TCTGTCTGAGCATAAGTATACAGGCAAGTTTCAAATGGATCACCCGAACTTATTAATATCATTTTCAAAAGGTCACACTGAAGTTAAAAGACAGGAA
AAGTGTCCTTTGCATTTTCAATCCTTTTTTATGTCAGTTAGGAGTAGCTAAGATTTGAGTGACTCTAAGCTCCGTGGTACTAGATGGAACACTTTAA
AGAATGGCAAGTCGTTTTCCTGTGGCCAGCCAGCCAGTTGAGAGTGGGAGCCTFCTGGAATCTTCTATCATAGGGGGATTTTGAGTCAATGTCCTGG
GTCAGGGTTGGGGTGGGGGTGGGGGTGGGGGAGAACTGAGATCAGTTTAAAAGCATTGCTCTGGAGAGGGGCTCCAAGCAGAGGAGGTGGGGGTTGG
ACAGCAGAGTCTCCCAGAGTGTGCTGTTGGCAAGTGGCGCCTGGTCTCCAGGTTGCTTGGCCATCCGTGCTGGATCTGGAAACTGGAGTACGAACAG
GGTGGCTCCTTTCTGTGAAGATGAGGCAGGATATGACTGCTGTGGGCTCCTGAAGTAATCTCACCACAGTTCAGGACAGGCAATGTCTGTGATTTGT
AAAATCACATAAAACAGAAAAATCATGTAGACTGAGCTGATGCTGTGAAAAATGAGGACCATTGGAGGAAATTAAATAATTGAGAAATTCCCAAAGA
TGTTAGCTCCCAGGGACACTGGGAGCAAGTTTTCAGCAAGGCCATTGCTCTTGGCTTGCTGAGGTGGCGGGGAAACGAGGCTGTGAGGTTCCTCCAA
CATTTCTCATTCTCTGTCTCTAGGAGACCACATCCTGAGGTTTATTAACATAACAAATTCATAGATCTGTAAAACAATAAAACATGAAGGGACATTC
TGGCTAGTTTCACCTTTTAAATGCTTAATCTAGAGCCAGTGAATCAGCCGCCTCCCTGGCATCTCTGCCTCTCTGAATTTCTATTTAAAATATGGTC
ATTAGCTGGGCATGGTGGCGCATGCCTTTAATTCCAGCACTCGGGAGGCAGAGGCAGGCGGATTTCTGAGTTCGAGGCCAGCCTGGTCTACAAAGTG
AGTTCCAGGACAGCCAGGGCTATACAGAGAAACCCTGTCTCCAAACACACACACACACACACACACACACACACACACACACACACAAAGGTCATTG
AACACCTGGCCATGGTCACGCTAAGTGCGTTAAGTGTCCTACCAGTGGGGTTGCACTTGATCTGAAAAAACAAATTCTTTGCATTAATCAATCTGCT
GAAGGTTGGACAGCTTGAACTTCAGAGCCCTCCTTTGTAAACATAAACATCTATCTGTATCCTTGCATCTCCTGCTAAGGTCTTGTTTGTCTTGTTT
CTATTTAAACAATACACTCTGAAATTCTTATTTTTCCCTGATCATCTTAGGCTTGGTCAAGAAAGTAAAGAAAGGTCTATCTGTTGCTGTCTGTCTA
TCTGTCTGTCTACCCTCCCCCCTTTCTCCCCCTCTCTCTCTATCTCTCTATCTGGCTGTATGTGTGTGGGTATATATAGATCTTTATATAAATATGT
GATACATATGTATGTATAATATTTATACACTAGTTTTTAGAAGATTGTTCCATTTTAACAGTGTACACAAGAATAACCTTTGGACACAGTCCTTCTC
ACTATAACATTGTAAGGCAAAGTCCATAGATGAGGATGCTGGAAACATGGATATCTGAACAGCAAACACTTTATGGGTGTCATAAAATTAGGCAGAT
GGTTAACAGGATATTTAACAGACTGTGATCCACTTACGCAATAGAAATTGAGGCTGACACTAGAAGTGGCCATGGAGATCTTTGTGTATAGACTTAG
AAAGATGTCTGCGAGGCTGAATTGAGCTAATCAAGCCAGGGGAGTGTGCAGAGCACCATCTGCTAATGTGAAGCTTGCAAGGTTTGGGGATGGAAAC
ATAGTCTCCAAATTACCAATGGTGGTTACTTCTGAGTGCCTGGGTTGGGGTAGCTTGCCTTCCTCCTGGTGCTCTTTGCAGTGTTATTGTGACTTAA
ATGTGCTGTTTAAACAATCAGAAATAGTCCCAGAGTCTTTACAAATCAGCTATTTTAGTTGGGGAAGAACACACCAAGGCAATTTACCACCTCAACT
GCTTATCCAAGGACGATGGGCTGCTCCGTTAGGGTGGGAGGGCCCCAGACTTGAGGAATGTGTGGCTGAACTGGATTGTTAGTACCAGCTCACAACC
CAACAGCTACCCCACTCAACAGGTGTCAGGAGGCTCTCCTCAGCGGCACCAAGTGTGGCTTCTGCTTCCCACAGCAGTGGACTGGTCCACAGGATAA
AGGTTCCTTTCGGCTTGTTTTTCCATAGCCTCACCATGGGGCCCCATAGTAGCTTTCAGAGGAAATGCCACTAAGTGTGGCCACACTGTCTTGTTCA
TAGGATCAAAGTGTTAAAAACGAAAACTTGGGGTTTTTAGGCCAACCTGTCATGTTACCAATGAGGAAATCAGTGTCTTTCTCGGGGACACAAAAGG
ACCCCAGGTTCTTGCTTCCTTACCAGCCTGTATCTGTTTTGTGATATTCTTAGTTTTGTTTTTGTTTGTTTTGTTTGTTGTTCCTATCTATCATTTT
GCAAAGGGTTAGCCAAGAAGTAGACTGATGGTCAGGATGCTTACACAAGACTCTCATTACTTCCAAAACATTTCACCAACAGGGAGAGACCATAAAA
GGAGTTACAGTGGATAAAGCCTAGAGTTTAAAGAATTATTTATTTATATGTGCATTGATTGGTGTTCTGCCTGCGTGCTTGTTACAAGGGTGGCAGA
TCTTCTGGACTTGGAGTTACAGACCATTGTGAGCTACCACGTGGGTGCTGAGAATTGACCTCAGGTCCTCTATAAGAGCAGCCATTGCTCTTAACTG
TCTCACCAGCCTAGGCCTAGAATTTAAAGGCCCCGTTAATTAGAAGATGTAAAGGCAGGACCCCAAAAGGATGATGGTATTTTTGAAGAATATATTG
TCATTAAATTAAATACATGATGATTTAATATGTATACTAAGAAGGAAAAACATCCTTTGAGAGAAAAACATCAAGACATTCATCACTAAGTGGGCAG
AAACTACACAGAAAGCTTACACACATTTTTCCTACCCAAATGAAAATAACCTAATTTTCAATTCTGATGACAAAAACAGTACACATTGAGACAGGGT
TTCTCAACCTCAGGGTGATTGACAGTCTGAGTCTTATACATTTTTCTTTTTCCTTAGTATTAAGGTATTAAGGACCTTATGCAGCTGGGCAGTGGTG
GCGCACGCCTTTAATCCCAGCACTCAGGAAGCAGAGGCAGGTGGATTTCTGAGTTCGAGGCCAGCCTGGTCTACAGAGTGAGTTCCAGGACAACCAG
GGCTACATAGAGAAACCCTGTCTTGAGAAACTAAAAAAAAAAAAAAAAGACCTTATACATGCCAGGCTAACACTCTACCGCTGAACTATAACTCATC
TTTTCCCCACTCTACATTTAAAATTTTGAGACAAGGTATCACAAAGCTACCCAGGCTGGCCTTGAACTCACTGTTTAGCCCAGGCAGACATTGAACT
TTCAATACTGCTGCCTCGGCTTCCAAAGCAGCTTGGGATTGTGGGCCTACACCCCCAGGACTCCTAATAATTCTGATAATTACTATATATGGCTGTC
TTGTGCACCGCAAAATGTAAACTCTACCCAGTAGATGCCACTAGATTCGTCTCCCTCCAGTTATGACATCTGGAACTTGCCAGCTACCCCCTGAATA
GAATAGTTACCCCCATTTGGTTTTGATGTATTAGGTTCTGTTTTAAAAAGGTGTTTTGTTTTGTTTTGTTTTTTGCTTCATTAGAAGTTGACAGCTT
GCACCAGTAAGCAGGCAGCCGGAAAGGATGGCGGACGGCCTGGAACCCTTTGGAGTTCCGAGACTTGCCGCCGGGCCGGGCCGAGGCGGGAGGGACC
CTTCCAAGTTGACTTTGCGGGTGGAGGGAAGTCCTGGAGTTAGCAGGACTGTGTGCTTGCGACTGTGGGCGTGGAGAGAGCGAGTAGCGGCTGGAGC
AGCCGTGCTCCTCCCGAACCGACCGCGGCCACGCTGCCGGGACTTCCCGGACAGCGTTTGCGCCGCCCACCCCGTGGCCACGGGCCCAGGATCACAT
GGCTAGACCCGGAGCGGCCGGGGTGGGCGTCCTCCACTCTCTCCGGCCTGCGTTTTGCGAGTGTAGCGGTGGAGGCTGAATCGGATCCCACCAGAAA
CCCCAACAAGTGGGCAGTTGGGACTAGGGCGTTCACTAGGGCGTTAAGAAATCTTCACAAAACTAGTTGGCACAATTTCTTCCATTAGAAAGCATGG
CATCCAGTGCCTCTCTGTGACTGCTCTGGGTGGCTTCAGGTGCAGCAACGTTACATCTCAGGAGCTGTAGTCATCTTGGGCAGGCACTCACTGTTGG
TTATACCGTCTCACAACACAGTATGGATGCATCAAGGTGGCATTTCTAGTGCTATTTGCAACAGGGATATTTTGACAGCCATCAGAATGTCCCATAC
CCGGCAACCATCTCAAGTAAATTCCTGATCATGCACTTGATGAGGTGGCCATGAAACACAGTACTTGTGACACTGTAGCCATTACAAAGTTATAAAA
AAGGCAAAAGACAAATTATCTTTTCACTAGGGTTGAGCTTCTACAGAAAGAAGTATACACTTTGTTTGAAAAAAACCAGGATGCTAGTAAGTAGCGA
TGCGAGCAGGTGTTAGGAGCTAGGATTATGGGTGCCTTACATCTTAAAAGCTCTCGAAGGCTAGGCAAGGTGGTACAAGCTTTAATCCCAGCACTCA
GGAGGCGGAGGCAGATGGTTCTGATTTCGAGGCCAGCCTGGTCTATATAGCAAGTTCCAGGCCATCAGGGGTTCATAGTGAGACCCTATCTCAAATT
AATTAATCTTTAATATAGTTATACTGTGTGTATGTATATATATGTATATACACATATATACACATGAGTGTAAGTGTGTGTGTGTGTGTGTGTGTGT
GTGTGTGTGTGTGTGTGTGTGTGTAAAGAAGATGGCCAAAGTTGAGAACTCTGAAGGAAACTGAAATATCGCTGTTAGGTTTTGGCAGGAGGTTATA
ATTTATCTTCTCAGCTGGAGCTCTTTAGGGAATGAAAAAGGAGTCCTAGCAAATATCATACCAGGACAGCAGAGATGAACTTGAGCCATCCCCAGAA
AGCTTGGGAGAACCAAGGACAGTGACCTGGATCACTCACTAGTGCAAAGGAAAAGATAGAGTTCAAAACCAAGCAGATTAGGACCAAAAGGCCATTC
TGTGTGCCCAGCATGGAAGCCTAAGCCATTGGTCTCATGGGCTTTACATTCAACTGTAGGTCTGGAAACCAATTCAGAATCTCACTAGCTACACATC
ATGAAAACCGCTTTGACACTGAGGATCAACTGCAAACCACAGAGGAGGCTGGGAAGACCTGGGGAAACGGGGCCTGTGGAGAGACTTGGGGCCAAAC
ACAACATGAAGCATCAGAAACGGAATGTGAAGCCAGAGTCGGGGTGACAAGGATAAACCAGATATGTAATACAAGGATGGAAGATAGGAAATTGGAG
CACACAAAGACCATTGTGATCCAGGCTGGGGATTGCTCTCAACTGGAGACTTTTTTAGGTAGACCAGCTTTTATTAATTCTTAGACAGTTTCATACA
TATAAGCAGTACATATTGATCACTCTCTGTCCCCACTCTCACCGATACATTCCCTTCTCCCTGATCTACATCCTCTGATACTGATACCTGTGTGTGT
GTGTATGTATGTATGTGTATATGTGTATGTATATGTGTATATGTATATGTGTGTATATGTGTATGTGTGTGAATGTGTCTATGTGTATTATGTGTGT
GTGGTGTGTGTCTGTGTGTGTTTTAATCCACTGAGTTCAATTAACACTGCCCATTGTATTGTTCACTGATCATGTCAAGTAACGTCAGCTGCAGTGA
GTTTATTGGCCACATTACACTCAAACGAGAGCTTTCTCTACATTAACTGTTGACCATAGCAGACAGCTGCTTCTTTCTGGCCAAGGCTGATGAAAGC
ACTAAGTCTGTGGTATAAATATGAACAAGACAGTTTGACAGCTTGCCATTAATCAGAACAACAGGATCAGGTTACGTCCTCTACCCTACCACCCTAC
CATCCCATGCTGCTCTCACCCCTTCCCACCCGGGCCTAGACCCCCTAAGCAGCATGAGGCCTAAGTCTCTTAAGCCTTGAATTAGAGAGAAAGTAAG
AATGTTCATCTCTCCTGGGGAGAAAAGCAGAGCTCCAGCTGGGGTGTTGATTTGTCTGCTCAGCTCATGCAAAAGTTGGTCTTGGCACACAAACCAA
CCTGCTGTCTTGTCACTTGTGAGTCTTGGCACACAAACCAACCTGCTGTCTTGTCACTTGTGAGAAAGAACTATGCCCTTCTGTCTGTGGGTTCATG
AGAACTCTATGGTCAACGCTTCAGCCTCCTTGGGTTGGTCTGATCCGGGAAAGTCAAATACAAAGGAGGGAAATTACATTCAAAGTCAAGTGGTGCT
ACTCTCTATATGGCTGGGCCTTTTGAAAAAGGAACCTCTTAGATTCTTTTGTAACTGTTATAAAGCAGCTGGAATGTTGGGTTAAACACTCCCCGCT
AGCCTCGAAGATGTCATAGGTCTACTGAGTAGACACCGTCAGGAGCATTTGTCACATTCCAAGCTAGCAAGCAAGTAACACGATTTGGCTGAGCATT
CACATTGTGCTGTCTCTGTCGCAACGCTGAGGACCAACGCATGGAGACCATAGCAGCTTCCTTCTCTGCCCTGGAGGAGCTCACCAATCCAAAGGGA
CCTAGTGTGAGTGAGGTTTAACTGGTGAGTTCACACAGATCCCCACCTCTAGCCTTGCCATCCCAAGAAGCAGGGGTGCTGGGACCGGGGCAATGCT
GATGGAGTAAATGCAGTTGTAGCAGAGCCTGCTGACATAAGTTTGACCCCTTGAACTCACAGAACTGACTCTGGGAAGGTAACCTTTGACCTCCAAA
GGCCTGCCACTCATTCGAGTCTGCCCTCACACACATACATCATACACACATGTAATAACAATTAATAAGTETAGCACCTTAAGAGCTGTTCTGGGCC
AGGCATTGGTGGCGCCCGCCTTTAATCCCAGCACTCGGGAAGCAGAGGCAGTCAGATTTCTGAGTTTGAGGCCAGCCTGGTCTACAGAGTGAGTTCC
AGGATAGCCAGGACTACACAGAGAAACCCTGTCTCGGAAAAAAAAAAAAAACAAAAAAACAAAAAAAAGAGCTGTTCTGAACTCTTGTTTTCACCAA
TAATCTATTGTCTTTAAATGTCAAAGTATTCTAGAAAATTTTTAACTTAGAAATGTTCATTCAACTCCTAAGACTCTGTTTTATGCTACCTATGAAA
ATATATTCTTAACTTAGCTCGGTGGTGGTGCACACCTTTAATCCCAGCATTCAGAGTGAGTTCCGGGACAGCCAAGACTATAGAGAGAAAAACAAAA
CAAAGAAAGATTAAAAAAAGAGAGAAATATGTCTAATGAGATAAAACATGAAATACATTTAATAGTGATTAGTTCTGCTATTATACTCTTTTTAAGT
ATCTGCAATGAATATGATTCTCAATCTGGCTAAGCACTGGGCTCACCAGGGAAGTATTTTTAAAATCTTGATGCCTACACCCCATTTGTAGCAATGA
AATTGGGGCCTCTAAGAGACAGAGGGTGGAGTCTAGACAATGTGGAGTCTGCATGTGTGCTTGGTAATCACACAGCTTGAAAAGTGCTTTGTCAAAA
AAAAAAAAAGTGAAATAATGCAAGGCTGAAAGTGACCTCGGGACAGGGATGGGGCAGGGATGCAGGGAGACCTTCCTAAGCCCCTAACCTCGGAAAT
GATATGTGAATCAAAGCAGAGGCTGAGACGGCCTGGGGAAAGTGACCAATGGCAGAGACTCTGGGCCACAGGCAGAAGTCCTCAGGGACATGCAGCC
CAATGTGGAAGGAGTCCATAAGCTATGCATGTCCTCGGTCCCAGCACCTCGTGGCTGACACACACTCCAAGCCTCTGCTCTCTGTTTTTCCACATTG
GGCTTCCTGTGGTACCCTGGGAGCAAGCCATCCATCGGGATTTCTGTCAGCTACAAGTCATAAATAGGCCATGGAGGGGCGGCAGCAGCAAGCCTCG
CTTTCTTTCTCTCACATACCAAGCTCAGGAATGGAAAGAGCAGGTCTCTGTCAGCGTCATCTGCTTGGCTCTCCTCTCAAGGCTGCAAGATGGCTGC
CGGCCCTCCAGGCCTCAGTCTGTGTTGGCGGGGGGATTGATTTGTCCTTGCCCAGCAACTCTACCATGAAGAGAAAAGAGAACCTCTGTCCCTGTGC
CTCTACCTACATATTACAGTCATAATTATGTCACACGCACACACACACACACACAGCCCCAGGTGCAAGGAAGCTGGGTATTTGTGTCTCTCTAGCT
GAAAACAGTGGGGTATTTGGGGAGGACGCTAAGTGAGCCAACCTCTAGTAGGCCCATGGAAAAAATGAGGCCCAGGTAACATCCTTCCAACCCTGTG
ACTATGACAGGACCACGAGAGCATGATTGGTGTCTGACCAGCTATTGGTGGCCAGGAGCTGAATGAAGCCAACTCCAGAACCCAATGTGTGGTGACT
CCTCCCCACCATGAAAGTCAATGGTGGCAGATGGAGGACCGGTCCTCTCTCTCCTGGGGAGCAAGCCCACCTCTCCATTGGAAACCTTCATCAAGAA
CTGTGGGCTCCACTTGCCATGTGTACTTGATGTCTGGCACATGGTGGCACCAACTCCAAATGCCATGTGAATTGGAAGGTTACCATGCTAACGATAG
TGTGCATTTTCCTTTGGGCAGAAAAAAACTACAGAGGGTATTTCATCCTCTGGAAATGGCTGTTAGAAAATGCAGGAAGGTGGGGCTGGAACTATAG
CTTGGCACAGGCTGCTCTTTCAGATGGACTGCAGCACCCACACAATGGTGTGCAACCATCTGTAACTCCAGTTCCAGGGGATCCGACGCCTTCTTCT
GGCCTCTACGAGCACCAGGCACATCTGTGGTGTACTGGCATGCAGATACGCACATAAAATTTTTTCAAAGAAAATGCAGGAAAGTCAAAGCACTGGA
GAGCTGGCCATGAACAGAGCAGAACAGAGCTGTAAGGCATATGCCTGGGGAGTCCCTGCTGAGCCCCCCGCATGAGCTCAGGCTGGACCCCAGCCAG
GCAGTGCCAGCTGCTCCCAGTCTCTCTCCAGCTCAGCTGCCTGGGGCTGAGGGACTAGCCTGGGGATTCCCCTGTCACTCAGGAGCTCTGAGTGACC
TCCTCTGCAGCCCCTCCAATTGGGGATTTCCCAGAATGTTCCCACACCTCAACGCCTCCTCCTTAGCCACCCCCAGCTCTTGATAGATAGAAGTGGC
ATCAGGTGACCCTACAGGTGAGGGAGGATCAGCTCGAGGGAGGGAGGGAAACTGGGAGGTTGGCCAGTGAACTGAGCCTGAGACAATCTAAGCTCAC
AGGCTCCCAAGGCAGGAGGCAAAGGACGGGTGTTTGTGCTGCAGCCTACAAGCTGTGTGGTCTCCTGACAGGTTGCTTAACTTTTCTGTGCCTCAGT
TTCTCCTCTTTTGTAAAAGGGTGTGTTATGCAGTGGTGTTACCAAGATTAAATATGATGATAGCTATAAAATATACAAAAGGGTGGGTGTCATGAGG
CATATTCCTTTAACCCCAGCACTCAGGAAGCAGAGGCAGGCTGATTTCTGTGAGCTTATGACCAGCCAGGTCTTCACAGTCAGTTCCAGTCCAGCTA
GGCTCCAATAAGACTCTCAAAAAAATAAAATATGTGTGTACCATATATGCACATCTATTTAAATTGTGGTGCCAGACACACCCATAGGCACATGCAC
AAAAATATCAAAAGGCTTGGGGAGGAGATTACAGGCGCTAGTCTACTAATACATCTAGGTAGCCAATTTGGAATCTGAAATATTGGAAAATTCAAGG
GGAAACTGGAGACACCCCCATTCCTGTAGCTGTCGACATTAGCTGCCCAACGGGCACCCCGTGTAGCCTATAACCACCAAATGGCAAGGTTAACCCA
GATCTAGTTAGTTAGAACCTGTCACCAACAATACTAGTCCTCCCTGGAGGACOCAATGTCAGGAATAGCAGGCTCCAGCTGAGGATCTTTTTGGACT
AGTCATCTTGCCTTCAGGCGAAGCAGCTGGCATCCAATAGGAAAAGAGAGTCCTCCTGGGGCCACGCAGCCAAGACCACCAATGATTCNNNNNNNNN
NNNNNNNNNNNNNNNNNNNNNNNNNNNNNNNNNNNNNNNNNNNNNNNNNNNNNNNNNNNNNNNNNNNNNNNNNNNNNNNNNNNNNNNNNNNNNNNNN
NNNNNNNNNNNNNNNNNNNNNNNNNNNNNNNNNNNNNNNNNNNNNNNNNNNNNNNNNNNNNNNNNNNNNNNNNNNNNNNNNNNNNNNNNNNNNNNNN
NNNNNNNNNNNNNNNNNNNNNNNNNNNNNNNNNNNNNNNNNNNNNNNNNNNNNNNNNNNNNNNNNNNNNNNNNNNNNNNNNNNNNNNNNNNNNNNNN
NNNNNNNNNNNNNNNNNNNNNNNNNNNNNNNNNNNNNNNNNNNNNNNNNNNNNNNNNNNNNNNNNNNNNNNNNNNNNNNNNNNNNNNNNNNNNNNNN
NNNNNNNNNNNNNNNNNNNNNNNNNNNNNNNNNNNNNNNNNNNNNNNNNNNNNNNNNNNNNNNNNNNNNNNNNNNNNNNNNNNNNNNNNNNNNNNNN
NNNNNNNNNNNNNNNNNNNNNNNNNNCAGTATGGTTTTGCTCCAGGTCTCAATTGGTTTCCTTGGTAGGATGGCTATACTGACTGCAGCAGCCGTTG
TGAGAACCCTGATGGGCCTAACCACATTCTGAAAGGTGAAGAGAGCAGGCTAAGGTGGAGCAGGGAGGGAGGCAGGCTCGCTTGATCTCCACACTGC
CTAGTAGAAGGACATTTCCTTCACACACACACCCTCACCCCTCTCCCTCACTGAGTTCCGTCCCTTCTCACACCCGGAAGTTGGGTAGGGGTATAGT
CATTGTCTTTGTGGATAAACAGCTGACCCCAACTGTCCCTTTAGCTAGATGAGTCCTCTCCAGAGGCCCTGCTGCCCTCTACAGCTTAGAGGGATGG
GGCCCAAAGCAGCCACTTCCTCCTACAAGTCATTCTTTCTCTAGGGAGTGGCCAGTGTCTGCAAGGCTCCGAGCTTACAGACATTCCTCTTGCAAGC
AGCCGTCTGGCTTTAAGAGGTAAAGACACACTTTGCCTCATGGTGAGAGGCAGCAGGCAGTGGTTAGTCAGGTCTACCCCAGCGTGGGCTTTGGCAT
CTGTAGGCCCAGGAGGTGACAGGAGAAGGCCAGCGGGAGCTCCGCAGAGCGCCTGCTAGTGACTTGCCCTGCAGTCACTTCCCGAAAACTAGGCCGG
CCTCTAGGCGGGGAGACGATCGGAGCCCGCCCACCCAGTCCGTCCCTCCTTGCTGCCTTGGGGTTTGCCCAGGCTCTTCGGAGCACGGAACTTACAG
TAAATGGTGTAACCAGTGGAAACTCTCAGAGGGGGCGAGGAAAGGGCCAGGACTCAGGGCCCCAGTTCCCGTCTTAGCATACCGCTCCACCAGGTTC
ATTTCGCCCACCTTTCAGTAACGGGGCGCTGCCTTCCTGGTAAAAGGCTGACCTCCCTCTGGGATGTGCCAGAAAACAAAAACCAGCGAAATGCCCA
GCTGGCCTCAGCCTGCAGGAACAGCAGCAGCCAGGGATTGAGCATCCAGTTGTCGGCTTCCCTCAGCCCGCTTGAGATGGGGGTTTCCTTTGCACCA
GACTAGGGGCCCTGGTTAGCTCAGAGAGCATTCAAAGTGTCGCTGAGGCTCAGCGCCTTCCCATATGACCTTCAAAAGAAATGGAAGCTGTCTTGAT
GAGCAATGTCAGGGTCCTCTGCTCCTCCACAACTTAAAAGAGAAACCCCGACTGTACTGAGTTTCCGTGATTGGCAGTATAGCTGATAAATCCCATC
TCTCCTTAGCCTGCAGCTCACTCCTGCTGGATCATTTAGGGTTAATTTTAAATGTCAAGTTATCGTACATCTGCTAACCACTATACTTTTGAGTCAA
CATTCTCATGCCAACAATTGATGTTATCAGCCAGTCAGTCCACAAACACTTAAGTTCACTTGGAGCTTAAACGGGCATTTAATACATGCTTAAATAA
TTAAAGCAGGCTTTAATTATTTGTATCATATTTAATAGGGTTTTTAAACTTGCCCGGGCGTTAAAACGACCTAAGACACCTGTTAAAAGCTCAGATT
TCCAGAACTGAGGTGTTGGCTCCGTTGGTAAAGTGCTAACGGAGGACCTGAATTGTGTTCTCAAGCACCCATATAAAAAGTGGGGCGGGGGGAGCAC
GTGGCTGGAATGTGGGCGATGGCGAGATTGGAGGCAGATCCCTGAAAGCCCGAGGGCCACTGGCAGTTCCAGGTAATGAGACATCCTCTCTCAAACA
AAATGTGGACGGTGCCCGTGGGAGTTCTTCTGACCTCCATGTGCGTGTCACACATGCGTGCACCTGCACCCATACATGTGTGCACACACATGGAAAA
GAAAAGCCCAGATTCCAGAGTCCAAATTTCTTCCCAAATCCCAGATCTGCAGAAGAGCTGCCTGCAAGCTTCTGGCCTGAAATGAGGTTCCTTTGCC
TCTCAGGGGACTTGGGGGAGGCCCCCAGGACTTGGCAAGGTTCTGTTTATTCAGGTCCGGGAACCCCATTATCTGGAGAAGTTGTTGTTTCTCAGCA
ACTTCTATGCCCCAGTGCTGTGGTGGCTGGTAAATGACGCAGTCCCCACAACACTGGAAGACATTTCTGGACCAAGCGCTTGTTGCCTCTGCACAGA
GTACAGGGCTCCTCCTTGTTTGAAGTTTCACCCTCTATGGTTTTAGTTAGCCAATGTCAACTGTGGTCTGAGGATACTGAATGGAAAGTTCCAGAGA
TAAACAATTCATACGTTTTAAAATAACTCCAGCTATAGTATACTGTCATAAATGTTCCATTCTGTGTTTATTTATTGATAATCGCTTCCTATGTTTA
ATAAACTTCATCAGAGATTTACAGGTGTAGGGAAGCTCATAGTGTCTTCTGGGTATTGTCCAAGGCTTATGGATGGTTTGGAACAGGATCGCAAAAC
CCAGGAGGGAGCAGAATAGAATGCCAAGTCCATCGTAGATCCTCAATATTCAGAAAGGCTATAAGCACCCTAGCACCTGAGCAAAGCAGGCAGAGCG
CGTGAGGCAACCACAGACACAAGGCACTTGGCGTGTGTTGGGGAGTAAGAGGCACAAACTGCTTTCCTCTACCTGGGGCTGGCCCGACTGCCAACCT
GAGGTTTGTCCCTACCAAACTTGTATGTGTATTTCATCCCTAGTGAAACAACAGAGTTGAGGGGTGGTGGTGGCCACAAGGGGGGATTGTGTCACTA
AAAAGTACTAATGTCTTTCTCAGTTTCTCTTCTATTGTTTTTCTTCCTTCTCTCTTCCCTCCTTTCCTTCCTTTTCAGTGTTGCAGATTGAACCTAG
GGCTCCATTGCTTCTTCACACTAGGCATATCTCCCAGCCCTTGAGAATACTCATCCATTTAGAGACAGGGTGACAAGGGACTGTCTCTCTGTATTTC
CTTTCTAGCCTGGGCTGGCTTCAAACCCCCAATCCTCCTGCCTCCCCGTGCTTCATGACAGGACTGTGCCACCACTCCCAGCTTGTCTCTCACTAGT
GAGGGGATGGGACTGGTTATTGTAAGTGGATTGTTAAAGAGACCCCCTCTCTCTTATACACAAGCTCCTTTTCTAAGCTCCCCACTTGCCCATCCAT
TTTCCCATCATGCACCCCTCAGCCACCATGTCCTTAAACCTTCAGAACTCTGATCTAAATAAACTACCCAGCCTCCTGGAGTTTTCTTATAGTGACA
GGGAAGAGACATCTTAGGTGAAATTGCTATTCCTATTAGTCAAAATAGACAGCAATCAGCAGTTGCCCACGGGTCAACCTTATACTTACGCACACCC
ACATACAAATCTATGTGTATGTGTATGTGTGCACAGGAATTCTCAGTTGCCCTCTTCATGCCTGTGCTAATAGAAAACTTTAGCTCCCTGTGTACCA
CCTTTCTGCCATCATGTACCACCAACCTTCCCCCGACCCCCGACGCGAGTCATCATGCCGATTGTCTCTTTACAGGAGAGTGAGGACCTGGAGAAAC
AGAACGCAGCTCTCCGCAAAGAGATCAAACAGCTCACCGAGGAGCTCAAGTACTTCACATCAGTGCTGAGCAGCCACGAGCCCCTGTGCTCCGTGCT
GGCCAGTGGCACCCCCTCGCCCCCCGAGGTGGTATACAGTGCCCATGCCTTCCACCAGCCTCACATCAGCTCGCCACGCTTCCAGCCCTGACCTTCT
GGACAAGAAGGGCGATGCTACTCCCGTGATCCCTTGGAGGGGCATGTAAACTGAGGCCGGGCTGCCGTCATACCTCTACCCAGAGGCCCAGTGGCAG
AGGCCTGGACAAGTATTGAACACAAGAACTGTAGTGGTCAGAGGGACTTAAGGCCTCCCAGGGAAGTATAGTCAATGTACTGGACTCTCCCAGGGAA
GTCGAGCCAATGTACTGGACCCAAAAAATGACAAGTCAACCCTGGACTGTCATGAATGATGCCCAAAATACACAGCACAGAGGGAGGAGGGCAGGGG
GTGGATAGTTTTCTAAATAAATATTTTCTAAAAAACCAGCCCTGGAAAGCGGCTTCCCTCACTTCTCCCATCAGCATCGTGCGAACTACTTTCTCTT
GATTTGGCACCTGGTTTTCCTTCTTGGCTTCAGGGAGCTCTTCCAGACTCTATGAATTCCACTTAGCTGTCTGCTCCATGTTTTGTTCCCTGTTTGG
GAAGCTGGTCTCTTCAAATCATCTTCAACCTCTAGCTATCTCCCTCACACTCCTCCACAGTGTGACACCCCCCCCCCCAGCCGTGCCTCTTGCACGG
TGCTTTCTCTAAATGGTGGAGCCAGTCACTCTACAGTTAGAGAAAGGGCTGTATAAGACAGGTCAGGGAAATCTCAGTTTCTCCCACTTGTACACCT
TCCTGGTTGGCTGCTGCAGCCCTACAGTCAAGTCTCAAGGATGCTGTGGCAGGTTCCATGCCAGGAATATGGGTAACACAAACGCAGCACCTCCCAT
TCAAGGCCGTAGGTAACCTTTTGCCACACCCTGCCAAAGACGCCCTTAGAAATAGGACACTCAACCTGTACACTGAGTGTCCCAAGGTTGAGTAGCT
CAGGGCTGTGTTCAATTTGGACATCTGGTAGAAACCAGTGTTCTTCATTTCCCTTTGATGTCCACCTGTTTCTCAGAAGTCCCCAGGCCACACATCT
GTTGGTCTTCATGTTATGCCTTTACCCATAACAGTGCCCAGAAGCAAGAACAGCCGTCTCCTCCAAGGTTGCTTTGGAGCCTGTCCTTCTCCATAGT
CTCTGCTGACTGGCTGGGCACCAATGAGGTAGATAACCCAGGGCCAGGGCTCTGTTGTAGGCCCAGCCCGTAATCCCTCAGAATAGCAGAATCAGTA
GAAGCCACCTTCAACTGCCATGCTCTCATGAAGGGGAAGGAGGAGTCGGCCCTGTGCTTGTTAGCCAAGTCCTGACCTGTTGGTTAGTGACTCTGAT
TTCCCTAAAGCCTCATTTTGATGGTCCCTGCCCAGGTGTCTCTTACCCCCTGGAATAAGGGCAGTGTTGAGCTGATGTGAGCATTAAACTTCATAGA
GGCCTGACTAACCTGCCTCCTGCCTATGACTTCCTTGTGACCTGTCTATGAGAGGATCTCAGAGCAAATCATGGTGGTAGGGACAGAGTGGGCTCTC
ATCTTGGAAGCCATTGCCTCTGCATGCCCCAGAGTAGGGCTAGGCTGAGCCTGATTCAGAGTCTGCTTAGGATATAGGCTGAGCCTGATTCAGAGTT
TGCTCAGGTTACCGCCACTGAGTACCCCCTTGTCCTTCAGTGCCATCTCTGGAATCCTAATCTTCGGTCTCCCATCAAAACGGCAAACTGGTGCTTC
CCCCCCTTCCAGAGCAGAGGCTCCATATGTCTGGGATTTGTGACGGAGAGCGGCCTTCTCTTCAGTTCCCTACAGGACCAGGATTTGGGGGTCCTGG
CCCCTCTATCCCACCCAGCGGCCCCAGCATGAAACCACTCACTTCAGGTGCCCCGTGTGTCATCTGTCATCATCTTGAGACACAGAACTCTAGGTCC
AGTTTTCTTTGCAGCTGACCACTACTTGGCCTTTCATAGGCAGGCTTCCTFCCAGTCAGAGATGTCTCCCCTCACCCCTGCTGTAGCATGGTGATTT
CCCCCTAGAAATCCCGCACAAGACACATGACTGGCCCGGGCATCTTCTGAATGAGACTTGGGGCCAGAACTAGAAATGCGATCTCACGTGCGCTGTT
CCCATCTCTCAGCAGTGACTCCTCTTCCCCTTTCATTCCCCACTTTCTAATGACCCTGGGTGGTTCCACTTCTCCTTTCTGATCAGCTTGGTGAAAG
CAGACAGCAGAGGTGCAGTCTCTCTGCACGGGGACTGGGAGGGGCAGCCACTGAGTTCAGACATCACAACCCAGCTTAGCTGCTCAGTACAGGAATG
ACACATCACACCAATGGCTGGACCAGTTCTTAGGTACACACAGGCACCGTGAATGCAGTGGATCAGAGTATAACAAATGAATAGTATGTCATGTCTC
TGTAGCTCCATCCAATGGGGTCATGCTATAATGTAAGTATAGTGATTGCTATATCTCCCAGTTTGTAAGACAAGCTAAAATCATAATTCCTCTATGA
GCTCCTTTTCTCTCTCTCCTCTCTCTCTCTCTCTCTGTCTCTCTCTCTCTCTGTGTCTCTGTCTCTCTCTCTGTGTTTACCCCTTTCCAGTATTGAG
GGTTGAAGCCAGGGCCTCCAATATGGTAGGCACATTCTGTGCCACTGAACCACACTTCAGCATTGAAATCCAAGTTTTAGGATTATGAGTCTGTCTG
TCTATTTCGAGGCACTCAGGATCTGTAACCTTGGCTGGCCTGGCACTTAAATAGCTCAGGCTGGCCTTGAACTTGAAGCAATTCTTCTGCCTCAGCC
TTATGGGTGCTGGAATTACAGACATCTTCTACCACACTCTTCTCCAATTTCTAAAATAATCTATGGACCGACAAACTACATTGATAGGCCAGATTTG
CCCCTTACATCTGCTTGACCTGGGACAAAGTATAAATGTCCCATGTTCTAGGTCTCAATACCTAGACACCGTTCTCTTCTCTGGCAAAGATGACTTC
ACATCTGCCCTGATGTGCCAGCTTCAAATTTAGGATTTTTAGACACCTTGGAATTTGATCAGTTCAGGTAATGGGGAGACAGACCTCTAGTGGCAGT
CAGTCTGTTCTTGCTCCATCCCTGGCTCCTCCTGTCCACAGCATCAAACTCTGTTCACACTCCAGCCCCAGGAAGGACAATTCTGGAAAGAACTGCA
GCCATGGGAGGAGCATTAGCTTAGGGAGTCTGGGCATCCTGGAGACACAGAGCACTGCGGGCTCTGAGGAGGTGTGCCTCCTTTGTCCTAGGGATTC
CTTTCCTCGAGCCAGGCGTGGTGGCACACGCCTTTAATCCCAGCAGTTGGGAGGCAGAGGCAAGTGGATTTCTGAGTTCGAGGCCAGCCTGGTCTAC
AAGTGAGTTCCAGGACAGCCAGGGCTACACAGAGAAACCCTGTCTCAGAAAAAACAAAACAAACAAACAAACAAACAACAACAACCAAAGATCCCTT
GCCCCACTAGAAGGAATAAAAAACCAGGAGACAGACCAGGTTACCAGCTGCTGGACCACAACTGGCTGGCAATGTATATTTGAATGTATACTTCCAG
CCCCTGTCACAGTTGCTCCTGTGGTTTTGTGACACAGGAGGTGAGGCATCTGGGTATCCCACTTACTTGGAGGACAGGTAGGCTGTCTCCATCCTCC
TTCTGCCCAGGTTCCCTTCTCTCCAACTGATTTCAGCATTCCAAAGTTGTTCCAGGGAGTCCTAGCAATGAAAGGGGTTAAGGAACCAAGACCAACA
CTAACTTCCAGTTCTGCTTTGTTTTGTTTATTTATTTTTAGACATGGAGTCTTTCTGTGTCTATGTATCTAGTCTGGCTTCTAACTTCAAATCCTTC
TGCCTCATCCTCCTGAGAGTAGGGATTGTAAGCATAGAGAGAATTAATACCTTAAGACCCGCCAAAGGGCAGTGCGTGACTCAAAGGAATGTGTTTC
TCTTGATTTTAGGTCACCAACACTGATGCAGGGATGTTTGTTAGAATTGTTGCTATAGAGATGAGCAGTGTCTGCCCTAGTCTTCAGTACCACACAA
AGAGTGGGAGGTAGGACTAGAAAGGGGACAGAGATGTGCCAATCCTAAAACTCTTGTGGGGTATGTGGCTTAGTTAAGTTCACCATGTGATGTAATG
AAATACCATGAACAAGAACTTGGGGAGGAAAGGGTTTATTTGGCTTCTATTTCCACAGCATTGTTTGTCACTGAGGGAAGTCAGGACAGGAACTTGC
AAACAGGGCAGGAACCTGGAGGCAGGTGCTGATGCAGAGGCTTGGAGGGATGCTGCTTCCTGGCTTGCTCCTCATGGCTCGATTATCCTGCTTTCTT
TCTTTTCTTCTTTCTTCTTTCTTTCTTCTTCCTTTCTTCCTTTCTTCCTTCCTTCTTTCTTTTTCTCTCCTTTCTTCTCTTTCTTTCTTTCTTTCTT
TCTTCCTTCTTTCTTTTTCCCTCCTTTCTTTTCTTTCTTTCTTTCTTTCTTTCTTTCTTTCTTTCTCTCTCTCTTTCTTTCTTCCTTCCTTCCTTCT
TTCTTTCTCTCTCCCTCCTTTCTTTTCTTTCTTTCTTCTTTCTTCTTTCTTTCTTTCTTCTTTCTTTCTTTTCTTTCTTTCTTTCTTTCTTTCTTTC
TTTCTTTCTTCCTTCCTTCCTTCCTCCCTTCCTCCCTTCTTTCTTTTTCTCTCCTTTCTTTTCTTTCTTTCTTTCTTTCTTTCTTTCTTCCTTCCTT
CTTTCTTTTTCTCTCCTTTCTTTTCTTTCTTCCTTCCTTCCTTCTTTCTTTTTCTCTCCTTTCTTTTCTTTCTTCCTTCCTTCCTTCTTTCTTTTTC
CCTCCTTTCTTTTCTTTCTTTCTTTCTTTCTTTCTTTCTTTCTTTCTTTCTCTCTTTCTTTCTTCTTTCCTTCTTTCTTTCTCTCTCCCTCCTTTCT
TTTCTTTCTTTCTTCCTTCTTTCTTTCTTTCTTTCTTTCTTTCTTTCTTCCTTCCTTCCTTCCTTCCTTCTTTCTCTCTCCCTCCCTCCTTTCTTTC
TTTCTTTCTTTCTTTCTTTCTTTCTTTCTTTCTTAACTTTTTATTGACTCCTCATGAGTTTCACATCATACACCCCAGTCCCGCTCCCATATCCCCT
TTCAACTTTGCAACCTCCCCCCCAACATAAAAAACAAACAAACAAAACCCAAAGCATAGAAAACATCTCATTGTGAAAGCTGTAGTATGTCACAGTG
TGTCCCACAGTATATCCTTCTGTCCACACATCTTCACTTGCAAATATTCGTTGCATTGAGTCAGAGTCATTGGTCTGGTTAGAGATCTCTGGCTTCT
GTGACACCATCAATATTGGATTCTTACCAGGACTCCTCATGGTTATCCTGTTGTTGCCCCGTGTCATGGAGATCCTGCAGCTTTGGAACAACTGGAC
TGACCCTTTCACGTGACCCAACTTTTAGCAGATGATATAGATTTAGGGTGTACCAACTCAGATCTTGGCCTACCAGGCAGCCAAGCTAGTCAGCCCA
CTCCCGCCCAGGTCCACCTAGACCAATAGGGTCTCCCTTATCTACATCACCAGGGGAGCTTGCAGTACTACTCTGGCTAGGCCACCCAATGCACCAT
CAGCAGGACGCAGGTTCAACTCTGTTCTCATGACTTCTCACCGGCTCACCCACACCTCCACCATCAAGGCCAACTCCATGGTGTTGCCTAGATGAGG
TGTACGGCCTGCTCTCCTGAGTGGTGCAGCTGGTGAGGGGTAGGGCCAGCTCTCCCACACTCATGACCCTGTGGGCAGCTTTCCCGACTGTCAGAGG
TGATAGGGGCAGGGCATGATCTCTGTGCCCATGCCACCCCACGACAGTAGAGTGCTGTCCCTGGTGGCCACCCTGGCCCCCGACTCTCATCTTGTTT
TTATGCTGATATGTGATGTGAGTTAACTCCCTTAAGATAAACAAAAACCGAATACTGCTTGAGTAATCTACTGGTAAGCAGAGCTAAGAAACCCTCT
CTTAGAGAATTTCATAGGAAAAGGCACAGATGGATCCTGTGCTCAGGGGTCTGCCTGGTAGACTCCTGTAAAAACGCTGCCAAGCCTGTCAATGACA
ACCATGGTTGAAAGGGGTGGCAGAGACTGGTCATTGTCTTATATTTTCTTGGCAATAAGATAATAAGTTCCATCTTCCTGCCTACATTGCAGCTAGA
CCTGGCCATGTGACACAGTTCTAACCATGAACTTTAAACAAGTAGGTCTTACAAAAAAAGCTCTTTAAAAATTGAAGCTGTCAGGGGACTGAAGAGA
TGGGTCAGTGGTTAGAGCACTTGTTCTTGCAGAGGACTAGGGTTCAGTTCTCAGAACCCATAGGGTGACTCAAAGCCATCCATAATTTCAATTCCAG
GGGATCTTATGTCCTCTGAACTATGAGAGAACCAGGCACACATGGTGCAAATACACGCAGGCAAAACATTCATACACATAAGAATAAAGAAATCTAA
ACAAGACAAAACAGTGAGGCTATCCCAGTGAGCACACACATTCCCCACCTCTTTTTTTTTTTTTTTTTTTTTTTTTTTTTTTTGCCTGAAAGTAGAT
GTAATACTAGAGAGGGAGCCACTATCTTAGGACCATGAGCAAACCATGCATGCATGGAAAGAAAGGAAAGAGATTCTAGGTCACTGATAATTTTAAA
AAAAATGGGGGGGGGGGGCTGGAGAGATGGCTCAGCGGTTAAGAACACTGCCTGTTCCTCCAGAGGTCCTGAGTTCAACTCCTAGCAACCACATAGT
GACTCACAACCATCTGTAATGGGCTCCAATGCCCTCTTCTGGTGTGTCTGAAGACAGCTACACTGTACTCATATATATTAAATAAATAAATAAATAA
ATAAATAAATAAATAAATATTTTTTTTAAAAAAATGGCTAAAACCATAATGGTTTAAAAAAAATACCATTCTTAACCGTGCATGGAAGTGCATGCCT
TTAATCCCAGCAATCAGGAGGAAGAGACGGGNNNNNNNNNNNNNNNNNNNNNNNNNNNNNNNNNNNNNNNNNNNNNNNNNNNNNNNNNNNNNNNNNN
NNNNNNNNNNNNNNNNNNNNNNNNNNNNNNNNNNNNNNNNNNNNNNNNNNNNNNNNNNNNNNNNNNNNNNNNNNNNNNNNNNNNNNNNNNNNNNNNN
NNNNNNNNNNNNNNNNNNNNNNNNNNNNNNNNNNNNNNNNNNNNNNNNNNNNNNNNNNNNNNNNNNNNNNNNNNNNNNNNNNNNNNNNNNNNNNNNN
NNNNNNNNNNNNNNNNNNNNNNNNNNNNNNNNNNNNNNNNNNNNNNNNNNNNNNNNNNNNNNNNNNNNNNNNNNNNNNNNNNNNNNNNNNNNNNNNN
NNNNNNNNNNNNNNNNNNNNNNNNNNNNNNNNNNNNNNNNNNNNNNNNNNNNNNNNNNNNNNNNNNNNNNNNNNNNNNNNNNNNNNNNNNNNNNNNN
NNNNNNNNNNNNNNNNNNNNNNNNNNNNNNNNNNNNNNNNNNNNNNNNNNNNNNNNNNNNNNNNNNNNNNNNNNNNNNNNNNNNNNNNNNNNNNNNN
NNNNNNNNNNNNNNNNNNNNNNNNNNNNNNNNNNNNNNNNNNNNNNNNNNNNNNNNNNNNNNNNNNNNNNNNNNNNNNNNNNNNNNNNNNNNNNNNN
NNNNNNNNNNNNNNNNNNNNNNNNNNNNNNNNNNNNNNNNNNNNNNNNNNNNNNNNNNNNNNNNNNNNNNNNNNNNNNNNNNNNNNNNNNNNNNNNN
NNNNNNNNNNNNNNNNNNNNNNNNNNNNNNNNNNNNNNNNNNNNNNNNNNNNNNNNNNNNNNNNNNNNNNNNNNNNNNNNNNNNNNNNNNNNNNNNN
NNNNNNNNNNNNNNNNNNNNNNNNNNNNNNNNNNNNNNNNNNNNNNNNNNNNNNNNNNNNNNNNNNNNNNNNNNNNNNNNNNNNNNNNNNNNNNNNN
NNNNNNNNNNNNNNNNNNNNNNNNNNNNNNNNNNNNNNNNNNNNNNNNNNNNNNNNNNNNNNNNNNNNNNNNNNNNNNNNNNNNNNNNNNNNNNNNN
NNNNNNNNNNNNNNNNNNNNNNNNNNNNNNNNNNNNNNNNNNNNNNNNNNNNNNNNNNNNNNNNNNNNNNNNNNNNNNNNNNNNNNNNNNNNNNNNN
NNNNNNNNNNNNNNNNNNNNNNNNNNNNNNNNNNNNNNNNNNNNNNNNNNNNNNNNNNNNNNNNNNNNNNNNNNNNNNNNNNNNNNNNNNNNNNNNN
NNNNNNNNNNNNNNNNNNNNNNNNNNNNNNNNNNNNNNNNNNNNNNNNNNNNNNNNNNNNNNNNNNNNNNNNNNNNNNNNNNNNNNNNNNNNNNNNN
NNNNNNNNNNNNNNNNNNNNNNNNNNNNNNNNNNNNNNNNNNNNNNNNNNNNNNNNNNNNNNNNNNNNNNNNNNNNNNNNNNNNNNNNNNNNNNNNN
NNNNNNNNNNNNNNNNNNNNNNNNNNNNNNNNNNNNNNNNNNNNNNNNNNNNNNNNNNNNNNNNNNNNNNNNNNNNNNNNNNNNNNNNNNNNNNNNN
NNNNNNNNNNNNNNNNNNNNNNNNNNNNNNNNNNNNNNNNNNNNNNNNNNNNNNNNNNNNNNNNNNNNNNNNNNNNNNNNNNNNNNNNNNNNNNNNN
NNNNNNNNNNNNNNNNNNNNNNNNTCTCCCTCTCCCTAATTGGACTCCCCCTCATAAAGTAAAAGGAACACCAATTTCTGGAGCCCCTAAATTCTAA
AGTTATGTAAATAAATCAGGAAAGGCAGGCTAAAAGTCAAAAGAATATAAGTAAAATAATTCAAAGTCCATATGACTTAATTCAAAAATCACAGTTA
TATGTAATTCTTATGGTATATCATGATTTTCGTGAATCTCTTAATATAGTTACTGACTCAATATTCAGAAAGAGTTGTTTTGCATATAGAAAACTGC
TGATTTAGAATTAACATCACTGTTTATTCAACAACAGCAAGTAATCAGAAATAGAAATCCTCCATTATATAACACATATCCAATCCCATACAGGTCT
GCCAGGCCCTCTAGCACAAGATCATGATGAAATCGGTCAACCATTAATAGGATACTTGCTAGAAGCTTCAGAATTTCATTTTAAAACACACTATTTA
AAAGGGGATTTTTCTATCACTTGACAACACACTGAGGGAATTATAAGGAAATGTCCTGCTTGTTCTTTGTATAATCAAACTCCGTTAACTGGAAGGA
GTAACCCTAAAGGTCCCCCAAAGAAATTAAATTTTGCAAATGGATATGTTTCATTTGCAGAGTTTAGAAAGATTAAAATATGTGCACCATACCGTAG
ACACGTATTCAAGATTTCAGTGGGCACAGCTTTAAGTTCTGGAAAGGATGGTTTTGTAATGACACATTTAACAGAAGTTATGGCAACCATGGGAATA
CCCTACAAATTAAAACTGACAAGGCTCCAGCATATGTCTCTAGTAAAATGAAGCAATATTTTTGCCTACTACAATAGAAAGCATATTGCAGGTATCC
CACACAATCCTACAGGACAAGCAGTTGTAGAGAGATCTAATTGTATTTTTGTTTTGTTTTGTTTTGTTTTGTTTTTCGAGACAGGATTTCTCTGTAT
AGCCCTGGCTGTCCTGGAATTCATTTTGTAGACCAGGCTGGCCTCGAACTCAGAAATCCGCCTGCCTCTGCCTCCCAAGTACTGGGATTAAAGGCGT
GCACCACCACGCCCGGCAAAGGGAGTCCAAAAAGCCTACAGCACCTGGCATTCCCAGGAGGTATCCCATCCAAGTACTAACCAGGCCCGACCCTGCT
TAGCTTCCGAGATCAGACGAGATTGGTCACGTTCAGGGTGGTATGGCCATAGACCTAATTGAGTTTTTAAAGGGATGCATAACAAATGAAAAGGGAT
AACAAAGACCCCCAGAGAAAAATTACATAAGATTTTACTAACTTCATTTTTTTTTTGGTTTTTCTTTTTTTTTCTTTAAGATTTATTTATTTATTAT
GAGTACACTATAGCTGTCTTCAGACACACCAGAAGAGGGCATCGAATCCCATTACAGATGGTTGTGAGCCACCATGTTGTGGCTGGGAATTGAACTC
AGGACCTCTGAAAGATCAGTCAGTGCTCTTAACCACTGAGCCATCTTACCAGCCCAACTTTAAATTTTTTAAATGCTAATGAACAACAAAATAAACA
AGCAAACAAAACAGCTGTTGAGAGACATTGGATTACAGGAAAAAAAAAAAAAAACGCTGAGCTAACCCAGCCTGTTTATATTAAAGATATCCTAACT
TCAGAATGGAAGGAAGGAAATATGTTATGTTGGGGAAGAGGTTTTATCTTTGTTTTAACAAGAGAAGAAAAGCTATGGACTCCTTCAAACCTAATAA
AGATTAGATTTGACCAGAGAAGACTTCCAGAAGACCCTGACTTCAGA
MOUSE SEQUENCE - mRNA
GCAGTCCCTCTGCACCCGAGAGAGAGGAGGACGCAGGGGTCTGTCAGAGGTTGCTGTTGGGCAAGCAGGGGAGGTACCTGTGGAAGGTGGTGTGCTG
GTGGCCCCCTAGCAGTCAAGAAGGGGAGCCAGCTAGTGAGAAGATCGCCCAGAGGCATCTGGGACGGTGTGGGAGAGCCCGGAAGATTAGAACCATG
CCTCACAGCTCCGACAGCAGTGACTCCAGCTTCAGCCGCTCTCCTCCCCCTGGCAAACAGGACTCATCTGATGATGTGAGGAAAGTTCAGAGGAGAG
AGAAGAATCGCATCGCTGCCCAGAAGAGCCGACAGAGACAGACACAGAAAGCCGACACCCTTCACCTGGAGAGTGAGGACCTGGAGAAACAGAACGC
AGCTCTCCGCAAAGAGATCAAACAGCTCACCGAGGAGCTCAAGTACTTCACATCAGTGCTGAGCAGCCACGAGCCCCTGTGCTCCGTGCTGGCCAGT
GGCACCCCCTCGCCCCCCGAGGTGGTATACAGTGCCCATGCCTTCCACCAGCCTCACATCAGCTCGCCACGCTTCCAGCCCTGACCTTCTGGACAAG
AAGGGCGATGCTACTCCCGTGATCCCTTGGAGGGGCATGTAAACTGAGGCCGGGCTGCCCTCATACCTCTACCCAGAGGCCCAGTGGCAGAGGCCTG
GACAAGTATTGAACACAAGAACTGTAGTGGTCAGAGGGACTTAAGGCCTCCCAGGGAAGTATAGTCAATGTACTGGACTCTCCCAGGGAAGTTCGAG
CCAATGTACTGGACCCAAAAATTGACAAGTCAACCCTGGACTGTCATAGAATGATGCCCAAAATACACACACCAGAGGGAGGAGGGCAGGGGGTGGA
TAGTTTTCTAAATAAATATTTTCCAAAAAACCAAAAAAA
MOUSE SEQUENCE - CODING
ATGCCTCACAGCTCCGACAGCAGTGACTCCAGCTTCAGCCGCTCTCCTCCCCCTGGCAAACAGGACTCATCTGATGATGTGAGGAAAGTTCAGAGGA
GAGAGAAGAATCGCATCGCTGCCCAGAAGAGCCGACAGAGACAGACACAGAAAGCCGACACCCTTCACCTGGAGAGTGAGGACCTGGAGAAACAGAA
CGCAGCTCTCCGCAAAGAGATCAAACAGCTCACCGAGGAGCTCAAGTACTTCACATCAGTGCTGAGCAGCCACGAGCCCCTGTGCTCCGTGCTGGCC
AGTGGCACCCCCTCGCCCCCCGAGGTGGTATACAGTGCCCATGCCTTCCACCAGCCTCACATCAGCTCGCCACGCTTCCAGCCCTGA
HUMAN SEQUENCE - GENOMIC
ACCCTGGCCTGGAGATGTCCAGCTGAAGAACAGAGAATGCTTGGTTGGGAGGTAGAGACTTGAGTTGCTCAGCAAAGTAGGAATAAAGGTAACAGGG
CTGTGAGATTTGGGAGCAGTAACAGAGAAAGCCTCAGAAGGGAAGGGGTAGACAGGCACAGAAGGCATGAGAAGGGTGACTTTCGAGGGAAACTGTA
GAAAGAGGATTTTTTGATTTTTTTTTTTTTTTTTGAGACAGAGTTTTGCTCTTGTTGTCCAGGCTGGAGTACAATGGTGCAGTCTCAGCTCACTGAA
ACTTCCGCCTCCCGGGTTCAAGTGATTCCCCTGCCTCAGCCTTCCTAGTAGCTGGAATTACAGGCACCCGCCACCATGCCCGGCTAATTTTTGTATT
TTTAGTAGAGACGGGGTTTCACCATGTTGGCCAGGCTGGGCTTGAACTCCTGACCTCAGGTGATCCACCCACCTCAGCCTCCCCAAGTGCTGGGATT
ACAGGCATGAGCCACGGTGCCTGTCTAGAAAAAGGATTTTTATAGAAAGTTGGTATGTGATGTTATTCCCTTTTTCCCTTTTCTTTTTTTTTTTTTT
TTGAGACAGGGTCTCTCTTGTTGCCCAGACAAGAGAGAGTGCAGCAGCATGATAACAGCTCACTGCAGCCTTGATGTCCCAGGTTCAAGCAATCCCC
CCACCTCAGCCTCCAGAGTAACTGGGACTACAGGTGTGCACCACCACATCCAGCTATTTTTTAAATTGTTTTTAGAGGTGGTCTTGAACTCCTAAGC
TCAAGTGATCCTCCTGACTCAGCCTCACAAAGTGCTGGGATCATAGGTGTGCACCACCCCATCCGGTCTTACTCTCTTTTTTTCAATATTTCTATTG
GATGAGACTCTACTTGGATAATCCCAGTTTTATATGGGTTACATAAAACAAATATTACGGCAGTAATAGCTAATAGGCACTGTATGCTTACTAGGCA
CTAATCATTGCACTAAGCAATTTAAATACATTCAGTGGTATGAGGTGGCACCATTATATAGATGAGGAAACTGAGGCACAGAGTTTTAAGTGATTGT
CCAAGATCACAGAGTTATGAAGCGACAGAGCCAGAATATTGGATTTCATATTGAAACCCAAAGCTAAGAGGCCGTTTTCGTGTTCCTGCTTTCCTCC
TTGACCATGTCTCTCTCTGTATGCTGTCAGGGTTGAGTGAGTGAGGGAAGGATGCTGAAAAGTCATTTGGTTCAGGCCTCACATTTTCAAAGCACTT
AACTCCAGTGAGGCCGTATATCCAGCCTGAGATATTTAGCCGGGCCTGAGAGATGAGGAGATTTACCCAGCTTTTGAGTTACTTTCCATTTATTGAT
GCTACCACCTCCAGAGACCCAGGAATTAAATACTCATATAAATTCCATCATTTTCTGGTTGTAGTATAAGTACATTACTTTTAAAACATACCATATT
TTTTGTTAACCTTATTTTGATATATCTTCATTTTTAATCTGATGGGAAACTGAAAAATGGAGTGGCCTCTCTCTCAACCTTTGAGAGGCCTCACTCC
CTTTCCTACTGTCTGAAAGGTGCAGGAAGAGGAGGCCCTGCAGGAAGCAGCTCTGATGCCCACTCCGGCTGCTGCCAGTGGCTGGCTGGATGTGCTA
TCAGCATGGCCATACCCACAGGTTGAAGTAGGTCAACAACCTGGGGACCCAGAAGCTGCGTGGTGCAAAGTGCATCTATCCGGAAATTTCCTGAGCT
TCAAGGGGGTTTATAAGGCAGCCACCAGGCCCAGACTGACCAAGAGAACAGGAGCTTTGGATGCATGTTCTTTAACCCAGTGGCTCTCACCTGGGGC
GATTTAGCATCTCCTCCCCGTAGAACATCTGGCAATTCTAGAGACATTTTTTTATTTTCACAACTTGGGGTTCTACCAGCAACTAGTGGGTGGAGAC
CAGAGAAGCTGCTAAACATCTTACAATGCACAGGATGGCCCACCGCCACAAAGAATTATCCGCCCCAAATGTCAAGAGTGCCACAGTTGAGGAAATG
TGTTCTAACCCTCTGGGGCTGGCCTTATGAAGCGCAGCCACACCCCTCCTAAGAGGCTTCCTCCAAGGCTGCAAAGCCTGAGAGGGCTGGACTGTAG
GCCACTCCGCCGCGGGATTTCCCCTTCATCACCTGGCCACCCACTCTGGCCCCCTTACTGGAGGGCTCCGCCCTCAGGTAAATGTTTTCCCTACTTG
TTTGGGAAACTTTGAGAAAAATCCCCTTTAGCCATCTTCTGAGCAGTGAAGATGTACCATGTGTGCTTTTTCCACCAAAAAAACATTAAAGCGGCTA
GGGGATTTTTATTATTTTAGCTCAAATAACTAAATAGTGGCAGCCAACTCCTTTAAAGGCGACTGTCAGCCCTCAAAGGGGCGCTCAGATGGAACTC
AGAAAAAATTAAAAAAAGAGTGAGTTTAGTATCAGTGGATCAGGGGAGTGGGGATAACCTGGGAATTCTGGTCTGGTGGGGCAGGCGACACAGACCG
AAGGCCTCCGCCCACCCCCAGCCTCAAGCCCCCTCTGCGTGGGGCCCCTGGGGGCCTGGGGACATTTGCATGTACTCTCAGGAGATTCTCCTTTCTT
CTCCCTGGGTTTCATCTTTAATAACTAGATGATGGGCTGTTGGGGAATGCAGGGCCAGCGCTCTAGGAAAGTGAAACTGCCTTGCAGAGGGAAAGCA
ACCCACTGTGGCCCCGAAAGACCCAGACCGCCAGCGGCCCCGGGCAGCCGCCGAGGGCACCGGCTCACACTTCCTGCATTTCACAAGCTCTTGCTTG
GCATGCATTGATGACTTGAACTGGGGGGTTAACCCAAAAAGATCAAGTGCGAGCTCAAGGCGGATGATGAGAACAGATTCGGGGCTGGTTAACCTCA
GAGAGCGGGAGTCCGTTGGTGCTAATGAGGCCAAGGGAGCCCGGCTCCTTTCTGCCCCCAGGCAGGTGAGAAAGAAAGAACGGAGACGAAAGAGGGC
CAAATCGCTGTGTCAGAGCCAGTTGGGGGCTTTTAAAAGACGCCCACGCTCAGGCCCGCACCAGGCCACCTACACTGGAATATCTGAGGCTAAGTCC
CAAGCTAGAATTTCCCATCTTCTTTCTGGCCTTGGGAGATTTTGCATCTCCTTCCAGGGAAGGAAGCCTGACTTCTGAAATGATTCTCACGAAGGAG
AAGTGCTCCGTTCTGCAGTGAGCCTGGCCAGGGGGGCCACACCACAGACTCCCAGGAGGCTTCTGCTCTGCGTGGTTCTTCTGCTCTCGTTTCCTTA
ACGATTGGGCCAGAGCATCTCTGCTCTTGTAAAATAGCAGGCAATTAGATCTCGAAGTCTTTGAAGTGGGCAGATTCACCAGGCGTTGGACTGAAGT
TTCTATTTGTCCTGGCACTGAGAATAGCAAAGGAACAGGGGGACTGAACTGGTAAGGATATAGCAGGTTTGTTGCACTTTTAAAAAATATGTTTTCA
ATTACCTTAAGAACCCATTTATGTGCAGTATATCCTGCTGCTGATTTTGAACAAGGATGATCCAATAGGCACTGGTATTAAAACGCTGAAATAGAGG
TTGACAAGTAGCTGCTTCCCTAAATCCTTGGAGTTTCCTTCCTCCCTCCTTCCCCTCCTTTGGCACCAACCCCCTTCCCACCTCCCCAAGATCCAGC
AACTAAAAGGTTATTTGCTTGGCACGGCAGGGAGTAGGGGCTGTGCTGAATGGTGGGAACCCACGCTACATGGGTTGTCAGCTGTGTCACCCCTAAT
TAGACATCATTTCAATCTACTCATGAAAGCAGCTTGCTGCAGGACTCTGTGCTGGCCATATTTAATTAGAGCAGTATAAGGTTTTTTTTTTTTAAGT
TAAAAACTCATATTGTATTGCCCATGTACCAGAGACTATTCTAAGAACTTTACAAACATTAACTCATTTGATCCTTATAACGACCCTATGATATTGG
TGGTGTGATATCCTCCCGTTTTCTAGGTATGGAAAGAGGCATAGAGAGGTGAAGTCTCTTGCTGATATCTTCTAGACCGGGCTGGCTGCAGGGTCTG
TTGCTCTCAACCAGAGGAAATAGAACCATGAAAGAACAAGGTAGGGTTTTCCTCCTTCTGCCAAACTGAGATTCACAAAGTGGACTCTAGCATTCTT
CCTCTCTGCCATTCCCTCCCACCAAATTTACACCTGGGGAAACAGTGGCCCAGAGAGGGAAGGAGACCTTCCTACAATCTCAGAGTCAATTGGGGGC
AAAGCTAGGACCAGAATGCTGCCTCTCAACTCCCCCTCGACCTCATATCATATTGCTTACATCCAGCTAAATGTCTCCTCAGAAATCAGTTGGGGAA
TATGGTGATTTTAAGTCCATAAATTCTTTATTTAATACTCCTCCCTCTAAGAGGTAGAGACTCATTTGCCTCCCCTCAAGTGTGGGCTGGACTCAGT
GCTCCATTCTACTTTTTTCTTTTAGGTCAGCCTGTTGCCCAGGCTGGAGTGCAGTGGCTCAGTCTCAAATCACTGCAACCTCCGCCTCCTGGGCTTA
AGTGATTCTTCCACCTCAGCTCTGCCCAGCTAATTTTTTGTAGAGACAAGGTCTCACCATGTTGCCCAGGCTGGTCTCAAACTCCTGGACTCAAGCA
ATCCTCCTGCCTCGGCCTCCCACAGTGCTAGAATTACAGGCATGAGCCATGCCACCCGGCCCCAAGAGTAGAACAAAGATGGAGGACTAGGTCATAA
AAGACACTGCAACTCCTCTCTCTCTCTCTCTCTCTCTCTCTCTCTCTCTGTCTCTCTCTCTTTCTTTATTTCTCTCTCTTGTTGTTCACTCTCCAGG
GAGCCAGTTGCCATGTCATGGGGAGGACACTCAGGCAGCCCCGTGGGGAGACTCATGTGAGGAGGAACTGAGATGTCTTGCCAACATCCATATGAGG
GAGCCATCTTGTAAATGAATCTTCCAGTCCCAATCAAGTCTTCAGATGACCAGAGCCTCAGCTGATAACTTGGCTGCAGCCTCATGAGAGATCCTGA
GCCAGAACCACTCAGCCAAGGTGTTCCTAGATTCCTGCCTCTCAAAAACTGTGTGAGATAATAGATGCTTATTGTTTAAAGTTGTTTAGGGTAACTC
ATTGTGTAGCAATAGATAGCTGAAACAGGAGGCTCTACATTTACTCTTTTTTTTTTTTTTTTCTTGGAGACAGAGTCTTGCTGTGTCACCCAGGCTG
GAGTGCAGTGGGGCAATCTCCGCTCATTGCAATCTGCGCCTCCCTGGTTCAAGCAATTCTCATGCCTCAGCTTCCCGGGTAGCTGGGACTACAGGAG
TGCGCCACCATGTCCAGCTAATTATTTTGTATATTTAGTAGAGACAGGGTTTCACCATGTTGGCCAGGCTGGTCTCAAACTCCTGACCTCAAGTGAT
CTGCCTGCCTTGGCCTCCCAAAGTGCTAGGATTACAGGCATGAGCCACTGCACCCAGCCTACCTTTATTCTTAAAATGCCATAAATGCACAGAGTGT
TTTGAGGAGTCTTTTATCCCAAAGTATTCCAACTATATTTCTTTTAAAAATTTAGGGCAATTAAGGCATTTTAATGCATGTGACCCTCCCCGCCCCA
CATTCCCCCACCCTTCATTATTTCAAACTGGAGTGGTCTTTTGAATTTTTTCCTGAACGTGTTTCCAGAAAGTTTATACCAAGTAAAACAGCTATAT
CCAAGTTCCTAGTAATTATTACAGCAATTACAAGGGTTCCAAGCCTAATAAAGTAATCTAAGGGCAGGAGGTTTGGAGGTATGGTTATTTCTTGGCA
TTCTTCTAATGACAGCCTGGAGCTGAGTAGCATCTTGGCAGTTGTCTACTGTTTGAATACGTTAGACTGCTCCCAACTCTGTCACTTGCTAACTGTG
TGACCTTGGGCAAATGATCGAACTCTCTGTGCCTTAATTGCATATAAATTTTAGAATCTAATTATGATACCTGCTCTGTGGAATCCTGGGGAAGATT
AAAATGAGATGTGGTAGAGCATGGTGCTTATAAGCATTGAACCAAATTGCCTGAGTTTGAGTCCTAGCTCCAGTGACTTTTCTAGCTGTATGATCTT
GGGAATGTTACCTAATCTCCTTGTGCCTCAATATTCCACATACATAAAATGGGGTGAGGTGGGGAAACGGTGCTTACCTCCTGTGACTGTCATGAGA
ATTAAATGGAGCCAATTCATATACTATTCCCGGTACACAGTAAGTAGCATATGGCAAGGATGCTAGGTATAGTTGTGCAGGTTGTTCACTGTTCAAG
GGCTCCAACCTGAGAGGTCAAGTGAGGGCTTGCCAGGCCATACGCTTTGGTATGAGGTTGCCTACCTAGAGGTGGCGCTGTTTTCTAGTTTGTACCA
GGCCCTATATCAGCCAGCTGTCAGCATAAGGGTTTGTAGTATCCAGCAACCACTACCTTAATACTATCTTTAGGCTTTAGGCTGATGTTCACTGAGC
ACATGCCAGTTTTATTATAACTGTTACTTGGTAGCTTCCTGGAGTTCTCCAGGATAACATCAGTGGGATGTGTATATCCCAAACCTTGCCATTACCA
TTCAGATACAATGCTGAAAATCAAATAAAAAATATTAGCAAGGTAAAAAGTTTAAAATCCTGCAGGACAATATTATATATTGCTTAGGCATACATAC
AGGTTTGGTTCAAGTATAGAAAAATGCTTAAGAATGATAAACCCCACATCTGGATAATGGGTTACCTGGGGTGGGGAGGAAGCGGAATTAGAAAGGG
ATGAAGGAAGCTTCGGCTCTATTCATAATTTATTTCTTCAGCTTAATGGTGGCTACATAAGTGTTTATTATTTTTTAATCTTAAATATTTAAAAATA
ATGTATAATTAATACTATTAAATAAGACCCGTCTTTTTATGTAAAAACTAATTTTGCATTTCTCTCATTAGTCTCTGTTAAATATTAAATCAGTACA
TTGATTGGGAATGACAGAATCAAGCAATCATTCATTCAACAAGTGTTTACTTGTTGAATGATAGGATGTTCAAAGAGCTAAGAACTTCATCCATACG
CTGTAATACTTAGAACGCTTGTAACATTTATAATAACCTGTTTGGTTATTTGACTATGTTTTCTTTTTTCTGTGAGAGCAGAGTCTCTGTCTTATTC
ATATTTAAGAATTCTGCTCTGTAATAGGTGATAAATAAATGTTAATTTAAACCGAATGAAACATAAATATGACTATTATTGTCCTGAAAGGGCTTTC
AATACACTAGGATAATGCAGGTCATAAGTGCCATAAATGAAGAGCAAAGTGAATTCACTTATGCATTCATTCGTTTGAAAACCATTTACTCGGCATC
TGTTAGGTACTGAGCATATGACTATAAACAAGAGAAACACAGACTTTGGTTTTTACAGGGCCCACTTCTCACCACTTTCATCACTGTCTAACTGGCC
TATGCTGCCAGCATCTTTTGTTTGGATGGTTGCAGTAATCCAATACTGAAATCCTGACTCATCTCCCTGCTTCCACTTTGCTCCCCTATCGTAAAAT
CTCAACTGTGTCCAGAGAGATCCTCTAAAAACCTAAGTCAGATCATGTCACTCCTCTGCTCTGACACCTCCAATGGCTTCTCATCTGTAGGAGATTG
TAGAAATTGCCACAATTAGTTAAATTTTTCCTATCGAGAAGTGAAGTCTGTTTCTCAACTCATTGAGTCTGAACTGGCCTTGTGACTTTCCTCGGCC
AATAGAATGTGGCAGGTTCTGAGTTCTGTGCTAGCTCTGAGCCTGGGTTCCATGGGGCTTCGAATGCTTCTGCTCCTACTCTTGGAATCCTGCCACT
ATCAAATAAACATGCTCCGACCAGCCTGTTGGTGGATGAGAGACCATGTGGAGGAGAAATGCCCAAGGCAAAGCCAGGCCAGACCAGTCAATTATCA
GCCAACCTACCAGCTGTCTGAGGACACATGACCGAGCCTAGCCGAGATCAGCCTAGCCCAGCCTATCCCCAAAGAACCTTTCAGATGACCCACAGAC
TCATGAGCCAAATAAATGGCTTGAGTCATCGAAGTTTCTGGTAGTTTTTTGGGCAGCGAACACTGATAGACTATCTCATTTAGACAAAAAGTCAAGC
TTCTTTTTACTAACTGTATCCTCAGTACTTAGTGCCTGGCACATGGTAGATGCACCATGAACGTTTGTTGAATATATTAATAAAGGTGTAAATGGTT
TTAACATTCTATTGAGGGAAACAGGAAAAAGATAAATCAGTAAACGAATAAAATAAGTATAAAATTGGGTAACTGCTATGGGAGAAATGAATAGTAG
CTGAGGTAGAGGATAAGAATGAAGGTGGAAGGGGAAACCCTCCATGGGCTCACTGTGTCTTTCAGAATGAAAGCTAAAATCCTGATGTTGGCCTCTA
AGGCCCTCCCTGACCGGGCCATTACCTCACTGACCTCATCGCCTGCCACTTTTGCTGCCTCTGGTATCCAACTACCTGGCCCCCCTGCTCTTTTTCC
AATACTCAAGCACACTTCCACCTCAGGTCCTGGAATGTCCTTCCCTGAGACACTCACCATTCACTCCCTCTCTTTCTTCGAATCTCTGCTCAGGTAT
CCCCTCTTTGGGCAAGGCCCTTCTGACCACCCAGAATTCCCTAACCTCCAACCCTGCTTTATTTTCCTCCATAGGAAAGGAATTTTGTCTTACTTAA
TTTAACCTTAGGGCAATATTGTCTTAGTCTAGAAATTCAGCTCATGGATACAAAAATCCTCTAGGAGCCGTAACTTCCTGTCAATCCTAAAATTTAA
TAAGGCAAATGTTTGGCTTCGAGCCATACTGGGAATAAGGTAAGGCCTTTTGAAAAAGCCACGATGCCCAGGTGAGGGTTGAATTGATCACTGAGAA
CCCTACAAATGCGCTCATGGCAAGGCTGGGAATACCCTACACTTACCCTCTCGGTCATTTACTTCAGAGTCTGCGGGGCATTCTAATCCGCGTTGTC
ATTTGCTTTGTGCCACATTCCTAAGAGGTAGGCAGGGCAGGTTTTATCATCCTCTGTTTACAGATGAAGATAATGAAGGTCACATAGCTCAAGTGAG
CTACCCAGGGCCACAGACATACAAAGTGGTAGAACCAGAATTTAAATCTTGGTTGGTCTGACTCCAAGTGTAGTATTTGTTTCACTTTTTCTTTCTT
TCTTTCTTTCTTTCTTTTTTTTTTTAACTGTTTCTCCATTCTGGGTTCTGACCAGGTGACCTTGAATCATAAAGATTCAGGGCCTGTCTTGAGCTGC
TCAATATGGAAGGCATCTTTTCTCTAAAGAGTGTGAGCTCCCTGCCAAGCAGCACAGGCGCTTAATAGGCTTTCAGAGCAGCAATTCTAGAACCTCC
CTTGTGGCTTTCTGATCTCCCACAGCCCTTGTGTTTGATGGTCAGGAAAGGAGAATACCCTTGGATCGTCTTATCTCCAGACCACCCCGAGGCTGGC
TGGACTTAAGGGGTGAGGAAAGACAAGATGGGTGAGCAGCTGCTTTCGGCTGAAAACCAGAAAGAAATCCCAGTGTTTTTGCTTTATTTTGGTTTAA
AAATCAAGTCGTATGACAATGGAAACATTTTCCTGGTTGTCCTCTCCTCTCTGCCCATGTTGACAGAAGACGGACTTGCTAATTCTGGCTGGGGTTT
TTCCCTGCCTGGGCTGTTTTTCTCTTTTATCTTCATCAATTGAAGAGGGCTGCTGTGTCTTTCAAACTGTCGGAAGGTATCTGTATTTTTTTTTCTT
TCACATAATTCTGTAGGTCTTTTCCCAGATATGTATTTTTCTCTCTAACTTCTAACTCGCTGAAGTTTCCGCCCATGTGACTTCCAGCGTGAGTTAC
CAGAAACCACAAGAGAGAGAGAGAGCGTGCAAGCCCCAAAGCGAGCGACATGTCCCTTTGGGGAGCAGTCCCTCTGCACCCCAGAGTGAGGAGGACG
CAGGGGTCAGAGGTGGCTACAGGGCAGGCAGAGGAGGCACCTGTAGGGGGTGGTGGGCTGGTGGCCCAGGAGAAGTCAGGAAGGGAGCCCAGCTGGT
GACAAGAGAGCCCAGAGGTGCCTGGGGCTGAGTGTGAGAGCCCGGAAGATTTCAGCCATGCCTCACAGCTCCGACAGCAGTGACTCCAGCTTCAGCC
GCTCTCCTCCCCCTGGCAAACAGGTAGAGTCCTCCTTTTTCTCTCTCCTACCTTCTGATTCTCCTGGGGGATGGAAAGAGAGCCAGGCTTCCTTGTC
CTGCCCAGGGAGCTGAGGATGGAGGAAGTGGCTCGTTGCACGGGCACTCTGTTAGACTTAGGACATGGAATTTGCTACTAAGCTGTGCATATTGGCA
GAGATCCTCATCCTTCCACCCATTCTTCCAAAGCCCCTTTTTCTCTCCATTTTCCAAGGCTGCCTATCACCTCTGCCTCACTGGGGTTGCCACCCTA
AAAAGCTTTCTAGGAAGCAAAGAGGAGGATGAACATCAAAGAATGCAGAGAAAAGAGTCTACTGTTCTCCAAGGCTGTAGAAAAGTGAGAGGAGTTT
TCAAGTGGGCCGCTGGCATGCACAGCTCAAATCCTAGATATGCAGTTTCCCAGGAGACAGCCAATAGGGAAGGGGAGAAAAGGGGTTAGGGAAAAGT
TAAAAAAAAAAAAAAGAAGAAGAAGAAGGAGAGGAAGAAGGAGGAGGAGGAGGAGAAACCCAGGGCTAGCATAGAAGGATCTCTCTACTGGGGCACT
GGAGGTGGCTCTGGAAATTTGTTGGAAGACATTTGCTGGTAGTTCATCTTAGCTCTGGGGAAACCAGAGAGACTGAGATAGGGATTGTGGGAGCATT
TGGAGTCTAGATTGTGACTTCCAAGTCCAAAGGTTTTAGCTTGAGGATTACCAAAAAAGGAGTGCCCTGCCCATCTCACAGCTTCTAGGGTTTTGTT
CTGCACCACACTCTTGACATCCCTTGCTGTAGGAAGCCCTCCTCTTTCTCATCCGACATGTATCCGTGGGTTAAAATTTTCTCAACCTTCATAGTTT
AAAAACTTCATTCTTTCCTTAGCACAGATATCCACAAGGGTTTTCAAAATGCTGCAGCCAAAATAAAAGTATATAAATATTGAACAGGGCGTATATC
CTAAGCCTCTAATAACGGAGCAGCAGGCTGGGATGAGTCTGGGTGGAGACCTCTAGAAGGCACAGAATCCAGTCTGCTGCTCAAGATGGTGTCAGAG
TGGCTCTGACTGCCTGGAAGTTTGTACTTTTCTTAGGAAGGAAATTACTCATGGCTTCCATGGTAACCTGGTGCCCCATCCCCCTTAGAGGAAGAGC
ACTTCCTTCCTATCTATGCCAATGACCTCCTACCACAAAGGCCTGAAAGTATTGGACATGTTGGTGAGCCCAGTACTTAGTGATCCCAGAGCTTTGC
CCTTGGATCTGTGCCCCTCTAGCCTGTGGGAGACGTGGAAGGGAACAGGGCATGAGTTGCCAGGACTCCTACACCTACACTGCAGCATCTGGGAGAG
AACTGGAGCTAACCTCTCTGCCCAGGCACAGGACATGCCTCTCTCTGGGTGTAATTAGAGAACACCCAAAGATCCCCTTATCCTACCAAGCACCCAT
CTACTGCCCACCACAGCCAGGTCACCTCCACCATTAACGTTCTTTTTGGCATTGATGTGCCAGGCATTGTGCTGGGGCCATGGGGAATGTCACAGTG
GCTGAGCACAACGGAAGGAAAGAGGAGGCAGATCTGGGATGCACCCTCAGCTCAGGAATGCAGCAGAAGACCACATGGGGTGCAGAGTAGCTAGCGG
GGAAGGGTCTTGGAAAGCCATTGGGCTCAGCACCAGAAGATGTAGCACTCTCAGATGACCAGGAGTCCTTGGGCACACTCTTAGAGCCTCAGTTTCC
TCACATATAAAATGGAAATGATGATATCAACTTCACAGCATTGGGGAATTAAACAAGAGCACCTCTGAAAGAACACTTGCCCAGAGGTTGGCATATA
GTAGGCACTCAACAAAGTCTGAAAAAAAGAAAACAGCTAAAAGAACAGCAAGAAGAGCCTAAAGGCCAAAAAGTGAGAGGGCGAGGGTGGAGCAGCC
CTACAGAGGAGAGGTGATAAAACACACTTCATCGCCTTAACCATTTTTTTTTTTTTTGGCCAAATACAGCTCTATTGAGTCCTCAAGTTCTCTTTTC
TTTTTCCTGTAGCTATTGGTCAAAAAAGTCAGAGACCTGGGAATGTGTAAGCAGGCATGGAGAAGAGCTCTCCTTCGGGTGCAGGCTTTTGGTAAAT
AGAGGGATGGAGGGTTCATGCAGAGACGAAGGCATGGAAGGATGGCTGGACGGATACCACACACCACCAGAGCCTGCTTTCACTCAGAAGGGAGATG
CAGACCCATGTAATCCTCCCCGTCTCTGCTTCCCAGGACTCATCTGATGATGTGAGAAGAGTTCAGAGGAGGGAGAAAAATCGTATTGCCGCCCAGA
AGAGCCGACAGAGGCAGACACAGAAGGCCGACACCCTGCACCTGGTAAGTGTTCAGATCAATCTTCATCCTCGTGAGCTTTAGGCTTTGCCCTCCGC
CATCTGGGAACCCTTGGACCATAGCTTTGATTCTGCTTGTGTGGGGATGTGTATGTGGGGTGGGTTAGTGGAGGGTGAGGGCCGTGGGGTGAGGTAG
GGAAGGGAAGCTGTCGTGAGAGTGCTTTAAGAAGGCTCTGTAGTCCGGGCGTGGTGGCTCACACCTGTAATCCCAGCATTTTGGGAGGCCAAGGCGG
GTGGGTCACCTGAGGTCAGGAGTTCGAGACCAGCCTGGCCAACATGGTGAAACCTCGTCTCTACTAAAAATACAAAAAATTAGCCAGGCATGGTGGT
GCATGCCTGTAGTCCCAGCTACTTGGGAGGCTGAGGCAGGAGAATCACTTGAACAGGCAGAGGTTGCAGTGAGCCGAGATCGCGCCATTGCATTCAA
ACCTGGGTGATAGGAGTGAAACTTCATCTCAAAAAAAAAAAAAAAAAAATAGAAGGCTCTGTAGCAGGGAATGGGCCAGGAGGCTGAACAGAGAAAT
GGGCCTTTCTACCCCAGGAGGGCTCAAGGGGTGGGAGAAGGCAGAGCTGTATTGGGAAAGAATTTAGAAGGTATCAAGTGCTTTGGGGACGGCCCAT
TGTCTCGCAGTGCAAGGACCACACATAGTCGCATCCCTTGGCAGAGACCCAAATGCCCCTGCATTTGACACAAGGAAATTCACAGGGCGCTGTACCA
GATTCCTCTTTTCAGAGCATTATTAAAGTCTTATTTTGAAATTTCTGTCTTTAATGGTATCCCAAGGGGTCTATGAAAGATGCAATTTCAAGTGCCC
TTATCTGGGATGATCACCATCCTAGTTGAGTTGCCTCTAGTCCCAAATTTTTCTAGAGAAAGCTTTTACCTCTGTCTTGAGTGGTCCAGGGGCCTTG
AGCAGTGCTGAACTGCAGTTCCGCCAGTGGCCAAGGCCCTAGATGGTGTTTCTAGGTTCTGGCTGTGCCCCTTATAAAGTACTGCTTCCTCCCCATT
GCTCATACCTTACCACCTTACCTCTCTTCACTCTGCCCCCAGTATGGTTCTTGTTCAACCAACTCTTCACTAGTTCCTTTCTCTCCATCCCCTCATC
CCCTTCCCTAGCAACTCTACCTTCCTGCCCTTGCTCCAGAAACATTCCCTTACCTCTAATAGCCTAGCAATTCCTTTCCATGGAAAAAGTGCAATTG
GCACCAAAAATCAATAAGCTTGTATTTATCTGGAAGATTAGCATGATAATCAGCCAGTTAGAATGGCTGTGTTAACCGTATCAAGAATAAGTAAGTA
AGATGTAGTTTTAGGGGAAATAATGCATCTTTCAGCTTTACAAGGAAACAGAGCAGACTGCACCAACAGCTCTGATTGGGTGCTTGGGTTTTATTTG
AAATGTATTCAGCTTACACTCCATTGCACACTAACATTAAATTCACAGCTATTTGTTAACTTTTTGGAAAGAATGAATGAACAGAAAGTCTGTACTA
ACTGTGCTCAACAGTCTGAATGTCAAGTTTTTGGTGGCCCTGCTGCTTGTATGTTCTCCATGATTTCACTGTGTCCCCACATTCTGGTTTACCACCT
TAAGCTTGAACATCTATGATCCTTACCTCTTTCTCTATCAGAGTCTGATTCTGATTCAGTATTCTTTAGGGCAAGCAAACAGACCAATCAAAATTTA
AAAGGATAAAATCTTCCTTGTGTACAAGTAGACAATGTCCTCAGACTGGCAAACTGCTGTAAGCTTTTTAAGTGTGTACCTGTTTTCTTAAGTGGAA
TGTAAGTATAGTTCGGCAGCTCAGCAGTCAGAACAGGGATTGAATCCCAGCCCTGCTGCCTACTATCTGTGTGACAGAGACGTTCTTGGCCTCCCTT
GGGCTTGGTTTCCTTATCTAGAAAATGGAAAATGACAATAACTACCCTATACAGATCGTACATTTAAAGAGCCCAACACAATGCCTGTCATTCATAA
ATACTCAAAAATTTAAGTATAATAAGAGTAATAATAATTATCATAAGAAGCAAGATAATCACAAATTATACACACATTTTATATATATATGAAAACA
TATATACATTTTGTGTATATTTAATCACAGAAGCTCAGGGTTGAAAGGTTTCTTAAAGGCTAGAAAGTTTAGACATAAGTTTGATGCTTCAGACTTC
TCTGCAACACCTCCAGCCAATGGTCCCATTGTATGCCTGGTCACTTCTAGGGCTGGAGATCTTCCTCTCTCCCAATTTATGAACAGAAGAGTCTTTC
CTATGTTAAGCTGCACCCCTGTCTCCCTGTAAATTCAACTCACTGGTCTTCATCCAAACCCTTGGGGAACGTATTAATGAGGGTGACACAGATGTCT
CTTTGCTGCGGCAAGGCTTTCAGCACTGAATCAGCTCTCTCCCTCTCCAAGACAAATGTCAGAGCCCAAAGAGTCAGCTCATCTAATTATACAAGTC
ATGTGACATTAGGGTAATCTCTAGAGCTTGAGGGTCCACAGAGCCCCAAGTCATATAGTCAACATATCCATAGCCACACCCCAGCCTCAGTTTCTAG
AATGTTCCAATCTTCCCCACATCTGAACACAGATTCCTCCTCCACTGCTTTCTTTTGAGCACCACAGCATCGTCTTTACCTTTTGCCCAATGAGTAG
GTCGCAGCGGAGTTGATGCAGCAAGCCTGCGGACTGCTGCCAATGCAACTTATGTTTCTTGGCTTCAGGTAGAAGCTTTTGGCAGCAACGTGTTCAA
TCTGCCCTACATCAAATTAGCTGTGGTTTGACATCTTCCTTTCCTCCGAGATGACAATCACCTATCTTCTCCATCCATTATCCTCTTAATTATGTCT
GAGATTCAGGTGAAAAGTCTTCTGGTTTACCACCAGTGTCAGGGCTCAGTGTGTGGTTTGCCCTTGACTCCTTTCCATGCTTGGCTCCACATGCTGG
GGTTGTTCTCTGGCCCTCAGACATGGCCATAGGCCTCGCCTACCAGTGCTTTACAGATGAGGGTTTGGGAGCTACTGAGAGTACCATATCAAAAAAG
GACCACATTCCTATTAGGGTTCTAGCCTCATATATACTGGTATGTTTTCTTAGTTTCAACTGCTGTCACTATTATCAACCTTAAAATACTGAAACAA
TTATCTTGTTCCTCTAGTGAGAGTGTGGGATGCTTACTATTCGACATTTTCAGCATCTATCCTATAAATGGCTGGCACCAAGACACTGTACATCGAT
TGCTTTAAAAATTGACAGAGTAGGGAGAGAGCCTCTTTTTATGATTGTGTTATAAATCCCTGGCCTTGACTATCTCTGACATAAAATGGATCGGTGA
TTCCTTTCGTAATTGTGACATCAACAAACAATCTAATTCTGTTTTAATTCTCCTTTTGTTGAGCATCTCACACAAGCACCCTGCACACTTAGTTCCT
TTTCTCCTGCAGACAACTGTAGGGTTCATTGTATATAGTACAGATGTTGATTAAAAAAGAGAAAGGCATAACTTGACCAGTTAGTTTCTAAAAGATA
TCAATAGCTAATAAGTGGACCTAAGATAATCAGCTGAAAAATTATTTGAAATAATAAGAGAATGCAGTCAGCTTCTAAAATTAAAACAAAATGTAAT
AACGTTCCTATATGCAAAACATAACCAATTAGGAAATTAATGGAAGGAAAGATCCTGTTTATAATACCAATGACAACAGCAAATGGAAGGAAGGAAT
AATTTAACAAAATTATGAAGAGTGTATCCTAAATGATTTTTAAAAGATTCAATAATTGGAAAGATATACCTTATGTAAAGTTAGCAATTTTTTCCTT
AAGTTAATTGATAAATTTAATGAGATCCCAATAAAAAACCCAATAGGGTTTTCTGGGATTTGGGCAAGAACTAGATTAGCTATTCTAAGTTTCCAGT
GAAAAAAAATCATATGACAATTGCCAGGAAAATTCTAAAGAAGAAGTATAATGAAAAAAGATTAACTGACCAACATATTAAAGTGAAACACAAATAC
AGAAATCAAAACAATGTGGAAAAGACAGAACATTGAACAGGATAGAATATGGAAACAGACCCAAAAACAAATTCAGATTTTAAGACCCAAATACATA
TTTCAACTCCTAGGACACAAGTATAAATACAAAATGGGCTGGGCACGGTGGCTCACGCCTGTAATCCTAGCACTTTGGGAGGCCAAGGTGGGCAGAT
CACTTGAAGTCAGGAGTTCGAGACCAGCCTGGCCAACATGGTAAATGTTAAATTTTTTAAAAAAAGGAAGCTAAAGAAACTTGAAAAGACAAATAAC
CATTAAAAATTTATCTTGGAATGAGGAATTATTTTCTAAATAAAACATAAAACCCTGAAGCCATAAAGGAAAAGATTGATATACATTACTTTTATTC
ATAAAAAGTAAAAGTTTCTTTATAGATCAAAATACTGTATGCAAAATCAAAGGCAAATGACAAGCTGAGGAAAAATATCTGTAATACATATGACCAA
AAAAGGTATGTTTACTTACTATATGAGAGAGCTCTTATGAATAGGAGATGATTAACAACCCAAAAGAAAAATGAACAATGGGCCGGGCGCGGCGGCT
CACGCCTTAATCCCAGCAATTTGGGAGGCCGAGGCGGGCGGATCACGAGGTCAGCAGATCGAGACCATCCTGTCTAACACGGTGAAACCCCGTCTCT
ACTAAAAATACAAAAAATTAGCCAGGCGTGGTGGCGGGTGCCTGTAGTCCCAGCTACTTGAGAGGCTGAGGCAGGAGAATGGCGTGAACCCGGGAGG
CGGAGCTTGCAGTGAACCAAGATAGCGCCACTGCACTCCAGCCTGGGAGACAGAGCGAGACTCCGTCAAAAAAAAAAAAAAAAAAAGTAAAGAAAAA
TGAACAATGACTATGAATAGGCAATTTACAGAAAAGAGAAATAAGTGGCCAATAAATGTGTGAAAAGATGGTAGACCTTATTTAGTTAGGAAAATGC
CAATTAAAGCAGCAGTGAGGCTGGCAAAGATGAAACATGTTGTTGATACACGATGTTGCCAAGGTAATGGAGAAGCAGGCACCATCACACACAGCTA
GTAGTAGAGTCTGCATAACCCTGGTAGAAGGCAATTTGCCCACGTCCATTCAAATTATAGGTGCACATACCCTGCGACTCAGCAATTTGACATCCAG
GAGTGTGTTCACAAACAAATCCACACATCATACAATTCTGTACATGTAAAGATAATCATTGCTGCATTGTTTCTTATAGGAAAGACTGAACATAAGC
TAAAAAAATCCACCAATAAGGGATTCAATAAATTATTGTCCATTCTGTGGAATATTGCAGATATGTTAAAATAATGAGTTACATCTGAATGTGCTAA
TCTGGAAGGATTATCACTTCTGTACTTTAAGTTAAAAAGGCATAAATATAGTCCATAGTTTGCTACCATTAGTTTTTTAATTTAATGTTTTATCTAT
TTATTTATTTTTTATTTTTAGAGACAGGGTCTCACTATGTTGCCCAGGCTGGTCTCGAACTCCTGAGCTCAAGTGATCTGCCCTGCCCACCTTGGCC
TCCCAAAGTGCTGGGATTACAGGTGTGAGCAACAGCACCCAGCCCCTTCTGTGTTTTTAATAAAAAGAAAAAGTTACATATATGCATAAGTATAAAT
GCAAACTTTTTCAAATAGATTATAAAAAATTGTTAATGATATTTATTTCTGAAAAGTAGGACTAAAGATCTAAAGCAAGAGGGAGATACTTGGCATT
CTTTACCTTTTATACAGTTTGGGATTTTTTATCACATGCTTTTATCTTTATAATATAGATATCAAAATTCTCAGCATTGATCATTACCACACATGCA
TTAGGAGGATTTCTTTTCTAATTTTGACATCAAACATTGAATAATCTTCCATCACGACATGGAAGAGTATTCAATCTTGACGTTATCTTTTGAACAT
CATACATAAATATCTCAGCCCTTGGGAGAACCAACTGTAAGTTGGGATTTGAGTGACTCTAAGGTCCACAGTACTATATGATAAAAGATGGCAAATC
CGTTTCCTTTGTGTAGCCATCTTGGTTGGTTGGTCATGGCTATCTGGTGCCGTACAGCTGGAAGGATTTCAAGTCAAAGACCAGGATCAGTGGAAAA
GAGAGCTGAGGTCAATTAAGAAGCTTTATTCATGAAAAGGCTAAAATCAGTGGAGTTGCCGGGAGCAGTGGCAAATAGCAGTGTTAGCCCTGAGCCG
AGCTGTTGACAAGTCATATCTGGCCTGGTGGATGGAGCTGAAAGCAAGTGAGAGTAACAGCCAAGTTTGAAAGCTTGAGATTTAGGTACTGTCTTAG
ATGGAAGTGGGCCAGGTGCTTGCCTGGGGCTGCCTCCTGAAGGAGTCTCACACCAGTATAAGAAAAAAGAGAGGTTTACAGGCTCCAGGGATGTGCT
TTGTCATATATGACAGAAAAGTCATGAGTATAAATTATGCATTAAATGAAGCTTTGAGCTAACACTGTGAGAAATACGGTATTTACAATTGGAGAAA
AATTGAGTAATGGAGGAAAAGATGTTTGGGTAGCACTATTGTTCTTGGCCTTCTGAGGAGGCAGAGAAGGATGCTTACGGTCCTATTTCACTCCTGG
AATTCTTTTGCTCTCTCTGGGAGACCATGCCATAATGTTTGTTGGCACAGATAAGTCACAGGTCAGGAATGTTCAGGCTAGTTCCACCCTTAAAAAG
TTCAATGTAGAATCAGTGAACCATCTATGGAAAGAGATGCGACCCTTCTGTCTCCATTGCTATGAATTTCTTTTAAGAAAAAACCATGTTAATTGAA
CAAACGACTATGTATTAACCACTGTGCCTCAAGTGCTCTCCCTGCAGCATCTCATTTAATCTGCATAAAAGCTGTATTTTATAATTCCTTGCATTAA
GTAACTTGATGGAGATGACACAGCTTGTGACTAGGTCTGTCTGACGTCAGAACCCATTTTCCTAACCATTAAGTTTTACTGCCTCTTTCTTCAAACT
CTGATGAAGATGTATTCATCTTCCCTAACCTATATTTTCCTTGAATCTCTACATGAATTAATTTTTTTGTCTTTTAAGCAATATCCTCCAAAATCTA
CACTGTCCCCCAGCCATCATCAGGCGTGATCAAGAAAGTAAAGACATGTTTACTTTCAATACAGTATATCCATTGTACAATTGATATCATATATGTC
ATATATATCATGATATCAACATATATAGATAGGTACTATATATAGATAGATACAATTGGTATATCAAATGATACAATATGTCAATTGAAATCTTTTT
TGAGAAGTCTGTGTAGCAATAAATGTTAACATCTTTCACAGGAATTACCTTTGACACAACAGAGTTTGAAGAAAAAATAATTTACAAAGATGCTTAG
TTCATCATTATCTGTGAATAGTAAATACCTTAACAATGCTATAAAACTTGACAGGGGGCTTACAACAGAAGATGAAGCATATTATGATACATTCATA
CAATAAAAAAATGTATGCTGGTACTAAAAATGATTATGTAGATCTGTATTTATCAGCATAGAAAGATGTCAGTGATACAGCATTAAGTGAAAAAGGC
AAATTACAAAGAGCATGCAGAGTATAACCCTTTCACGTAAAATTTGTGGGTTTTGGGCATGGTCGCATGCATAAAGAGATATCCGGAAGGATATTCT
CCAAAATGCTAATAGCAGTTATGAGTGGTTGAGTTTGGGTAGTTCATCTTATTCTTGGTACTTTTCTCTCTTTTTTATTATAATGAATGTGTGCCAT
TTTAAAAATCAGAATTTTAAAAATTAGGCTATTTTCATTTGGGGAGGGAAAACACATCAAGGAAATCCACCACCCCTAACTGCTTGTCTTACCGATG
ACGGGTCGGCATGGCTAAGTTTGGGAGGCATATTGGAAATTGGGAGTCCAGCTCCATGCTGGTGTTGATGCTGTAAAGAACGACTGTTTGGGAGGCC
AAGGTGGGCAGATCATGAGGTCAGGAGACTGAGACCATCCTGGCCAACACAGTGAAACCCTGTCTCTACTAAAAATGCAAAAAATTAGCCAGGCGTG
GTGGCGGGCGCCTGTAGTCCCAGCTACTCGGGAGGATGAGGCAGGAGAACGGCATGAACCTGGGAGGCGGAGCTTGCAGTGAGCTGAGATCACACCA
CTGCACTCCAGCCAAGGCAACAGAGTGAGACTCCGTCTCAAAAAAAAAAAAAAAAAAAGAATGACTGTCTGTCTACATAGGATGATGGTCCTAGGTC
ACAAACTGACAGCTGCCTGTTCAGCAGATGTCTTGATGGAGCTATTCTCAGCAGCACCCAGACTTCCTTCTCTTGAGCAGAATGGGAGTCTCCCCAG
AGTGCCCTTGTGCAAGCTTCTCAGAGGTTTTCTTACTCCCCTCTTTTGAACTTAGTCTAGTCCCCTGCTTCCTAGGAGGGGTGGGTTGGGTCCACAG
TATAAAGGCCCCTTCAGATTGTGGGATATCTGTAGAGGGTTCCACTACGGGTTCACATGATGGCTTGTGGAGGGAATAACAATCATAATAGTCATAC
TACCTTGTTGATAAAATTTCAGAATTAAGTGGGAACTCAGAGATCTTCTAGGGTGACTTGCCACATTTCCAATGAGGAAACTGAGGACGCCCAAGAA
CCCAAACCTCTTGCCTTCCCACCAGTCTGCTTTTGTTTCATGCCACTTTGCTGAACAGAGCTTTACTAGGCAGGTGTTTACATAAGGCCTATTGCAA
AGGTGGGCCAAGAAGCAGGCCATTAACCAGAACACTTGAACTGCCTAGACACTCATCAGCTCCAGAACATACGGCTATACATGAGACCAGAAAGAGA
GTGAGTCCAAACTTGACAGGGGCTGAAGTGTAAATGTTTCTTTGTTTAAAGAGATTTTAAAGTTGTAATCCAAAATTAGAAAGGGCAGTGACATATT
GGGGAAAATATTTGCATCAAATTAAAGAAATGAAGGTTTAATATTTATGCTACAGAAAGAAACTCTTATAAAGCAAAACATCAGGACTCCAATAGAC
AAGTGGGCAGAGGCAATGAACAGAAAGCTTACATAATATTTTTCCTACCAAAATGAAAATACCCTAATTTCCTATTCTGATTATGAAAACGATACAC
ACTAAGGCAGGGTTTCTCAACCCCAGTGGAACTGATACTTCGAGTCCGATAATTCTTTGTTGTTGGGGATTGTCCTGTGCCTTGTAAAATGTAAAAT
TTACCCACAAGATGCCAGTAGAACACCCCCTCACCCTGCTTAGTTTGATAACCAAAAATATTTCCAGAACTTGCTAAATGTCCCTGGAAAGGCAAAA
TCAGTCCTAGTTGAGAACGCTACACTAAGGAGAAAGACACATGGAAAGTTGTTCTTTCTCCTTAATACTTGACAACCTGTAACATTAACATGAAATT
AAGAAGCCTTCATCAAGCTAATTGGCAACAAGTAAATTATTTAAAATTATAACACCTAAATGCCAGTGAGGTTGTAGTGAAATGGATAGAAGCATTC
GCTAGTGGTGACATTATATACTTGATATGACCCCTTTTCAGTAATACTTCTCAGGACTGGGAAGATTGAATGCCTCCTTTGCCTCATTCATTTCATT
CCTAGGAATTTCTCCAAGGAAATCACTGAACAGAGACAAAACCCAGTGTGCATCACGATGTTCATCTCAGCATTATTTTTAATAGTGACAATTTGAT
AGCAACCAAGATGTCCAGCATTAGAAGACCACTTTAAGTAAATTGTGGATAATCAATTTGATGATGCAGTCATTAAAAATTATGTTGACTATGTAGA
TGTGACAAAGTTATGACAGAAAGCAAAATACAAATTGTATGTGTACTATGATTGAAATTTTGTAAAAATAAGTATGCATGTTTGTTCAAAAGGATGA
GATGGCCAAGTGGGATGGTTCATGCCTGTAATCCCAATACATACGGAGGCCAAGGCAGGAGGATGACTTGAGACCAAGCTGGGCAACAGAGTGAGAT
CCTGTCTCTACAAAATATAAAAATAAAAATAAAAATAATTAGCCAGGCGTGGTAGCTTGCACCCAGCTACTTTAGAGGCTGAGGTGGGAAGATCACT
TGAGCCCAGGAGGTTGAGGCTGCAGTGAGCCCTGATTACATCACTGCACTCTGGACTGGGTAATAGAGTGAGACCCTGTGTCAACAAAAAGGATGAG
ATCTCAATATGTGTAAATGAAAACAGCTGTATTAAGGGACTAGGATCATGGGCGTTTTTAACTTTTAAAAAATATCTTTAATGTAGTTATACTGTAT
TTTTTTATTTTTAAAGAAACAGAAGAAAATGGCCAAATAGAGAGCTGAAGGAACTCTGGAGGACATCAAGTACAAAGAGACAATATTACTGAGCTCG
AATTTGGGGATCAGGTTTTGGTAGGAGACCTTATAATTTATACCCCAAATAGGAATACTTCGAGAGTGGAAGATGGAACTTGTAAATATTACACCAG
GAAAACAGGTGTCCCAGTAAATGTCTGGTCACCCTAGACAGGGAAACCAAGAAAGATGACATGAAGCTCTTATGAAAACTCAGAAGTGATAAAGTTC
AGAGTCAAGTAGAGGGGACTGGATTCCTATGACCAAAATGTGATTTCCTGCAACTGAGGACCCTGTAACTAAAAAAGGGTACTCAGCTGGCATAAGA
ATATGTCTTATCATTAAGAGAGTAGGATGACACAGAAAATTATAAAGCAAAGGCCATATTATCAGTACTAGAGCTGAGATCAGCGGAAGTGATTCAT
CTACTCAACAAATATTTATCAGCCAGGAACAGTTCGTTCTAGGCACTGAGAATATTGCAGGGACAGGACAGACAGAGTCTCTGATTTCACGAACCTT
ACAGTCAGTTGGAAGTCAGGCTGGAAAACAAATAAACACACTAATCACATGACATGTAAAGTGCTTCAAAGAAGATGAAATCATGCAATGTGGAAAG
TGTCTAAGGGACGGGATTGGGGCAGCGATCAGGGGAGGCCTTCCTGAGGCCCTGGAATTTGAGATCAAAGGTGAATCAAAGAGGAGACTGGAAAGAT
CTGGGGAGAGGGTGATCTCAGCCTAGAGAGCCTTGAGGCCAAGCTGCGAGGCCAGGCAAAGGTCAGAAAGGTGCTTGGTAAGGTGGAGACCAAGTTC
AAGACCATAAGGGAGTGAGGAGGAACTCAGTAATAATGGCAATTGTAGGGCTGAGCACAGTGGCTCACACCTGTAATCCCAGCACTTTGGGAGGCCG
AGTTGGTTGGATCATTTGAGGCCAGGAGTTCGAGACCAGCCTGAGCAACACAGTGAAACCCCATCTCTACAAAAAAAAATTTTTTTTAAATATCCAG
GCATGCACCTATGGTCCCACCTACTTGGGAGGCTGAGGCGGGAGATTTGCTTAAGTCCAAGAGGTCGAGGTTGCAGTGAGTTGTGATAGCACCACTG
CACTCCAGCCTGGGCAACAGGGCAAGATCCTGTCTTTAAAATAAAATAAAATAAAATAAAATAAAATAAAATAAAATAAAATAAAATAAAATAAAAT
AAAGGCAATTGTGCTGCTAGGAGCAGGAACTGGATGGGGCATGTGGTGGGGACCCAACTAATTCAAACCCTGCCTGGGGGATTTCTCTGAACCTAAA
CTCTGATCATAAGTTGAGAAGCAATAGCACCTCACTAGGCTGTTTGACCGTTTAATTGAGAGGGCAAATGTAAGAACAAAGCAATATTGTCATTTTT
TTTTTACACTGTTCCTTTGTTTAATGCAGACAGCCTGCCCTTTTCCTAGAAATCAATCAGATATATTATCCTACATGAACACACACGTTCTTCTTTC
TGGTTGCTTATAAACTCTTTAAGGATATCAGTAGTTTCAGGGGCTTGGCCTTTCACAACTAGGCAAGTCTCCTTTGTTGGGTATGAATGGAGAGAGG
GTCAAATTTGAACTAGGGAAATGGCACGACGAAGTTCTTAAAGTGGTTGTAATTCTGCCACTCCCACGCTGTTGGTTCAGTTTGGGGAATAAACAGA
GGTTTGACCTAGGCCTTTTGAAAAAATGAATCTCTTGGATTCATTTGGAAGTATCCCAGATTTACAAAGTAGAAGCTATTAAAGTGTTTGAGTGGTG
TATAAGTTGGCAGTCAAGCAACGTGATTTGATCGAACACTTACTCTATGGCAGGCACTGTCCTTGTCACTGAGAACAAAACAGTGAAGACAATAATA
GCTCCTGCCCTCACAGAGCTCAACAATGTAAATGGTAAGGAAACGAAACGGTTAAAGTTATAATTAATGAAACACGAATAGATCCCTGAGCTCTTGC
CTTTCCATTATATGAATGAACTGTGCTGGACTATTTAGAATTGTTTCCACCAATTTAAGAATATAATAGTAGTGTGCTTAAATGGACATTTTGTTTT
AGAAATTTTTTTAACTAGAAATAGTCTCCCAACTCTTTAAATTTTTTAATATTATACTATAAATGATAAAATAAAATACATATTTAATAAAATGAAA
ATATGTAAAAATATAAACTCTTTAAGGATATCAGTAGTTTCAGGGGCTTGGCCTTTCACAACTGGGCAAGTCTCACAAATTTAATTTGTTTGTTAAC
GCGATCATGGCTGACTGCAGCCTCCACCTCCCAGGCACAAATGATCCTCCCACCTTGGCCTCCCAAATAGCTGGGACTACAGGTGTGTGCCACTATG
CCTGGTTAACTTTTAAATTTTTTGTAAAGATTGGGTATCACTATGTTGCCCAGGCTGGTCTCAAACTTCCGGGCTCAAATGACCCTCCTGCCAAAGA
AGCCTCCCAAAGTGCTAGGATTACAGCAACTGCACCTGGCCTTATGTTATTATTAAAAGGAATCCACTATGAACATGATTTTTTGCCCATTTGGCTC
ACTTAGGAAGCATTTTTAAAGTCTTGATGCCTGCAACCACTCCAGAACAATTAAATTGGAACCTCTGGGGGTCTGGCATCCAGGAATCCAGACTGTT
TAAGGCTCTCCGGGTGCTGGCAGTGTGCACAGCCAGGGTTGAGAATCAGAAGCAGTACATTTGCAGCCTATCAGGTCTGTACCTGAATATGTGGAGT
GAGTAGAATGTGTGGAGTGAGCAGAATGTGTGGAGTGAGTGTGGGGCAATTGTGTGGGTAAGTACACAGATACTCTGTCACATACAGTGGCCTGATG
GCTTAAAACAAAACAAACGGCCAGGTGCGGTGGCTCACGCCTGTAATCCCAACACTTTGGGAGCCCGAGGCGGGTGGATCACGAGGTCAGGAGATCG
AGACCATCCTGGCTAACACGGTGAAACCCTGTCTCTACTAAAAATACAAAAAATTAGCCGGGCATGGTGGCGGGTGCCCGTAGTCCCAGCTACTAGG
GAGGCTGAGGCAGGAGAATGGCATGAACCCGGGAGGCGGAGCTTGCAATGAGCCGAGATCGTGCCACTGCACTCCAGCCTGGGCGACAGAGCGAGAC
ACGGTCTCAAAAAACAAACAAACAAACAAACAAACTATTCAAACCCTTGCTTTGATGGCAGTTATTATTTGTTTTGTTGTTTGGTTTTGAACATTGA
TAATCTTGCTAGTGGTAACCTTTGTAACTCGAAGCATCAGTATCAGCCAAGATTGCATGCATTCAGAGACAAGTGAGAGACCAGCCATCAAATGAGG
AATCAACAAATCATGGCCTACTTTTCTCATGTAACAAGAAGTTCAAAAGTGGAGAGACCAGGCTACAGCAAGGAAGAACCAAGCTCCTTCTCTCTAA
GCAGCCATCCTCAGTATGAGGCTTTCATTCTCTAGGCTGTGAGATGGGTGCCGAGCCTCTCGGCATCAGTCTATGTTGAAGGAAGGAAGCCTTTGTC
CTTATGAGCAGGCTGTGCCTTTTTGGTAGGAAGGGAAGCTCTGCCTTCACCTCCCTCCCGCCCATCAGGTACTTCTGCTTACGTATCTTTGGTCAGA
ATTCTGTCACATGGCTACCCCTAGCTACAAGGTAAGGTAAGCTGGAATTTTTTTTTTTTTTTTTTTTTTTTTTTAGCAATTCTTTTCCCAGTCTTTC
TAGAGGAAGGCAAGGCAGAAGGGGTTTGGGATGGACGCTGAATGAACCAAACTATAGTTTTTTTCACATTTGAGGGCAATGAAATCATAGTCTTGAA
AACCAAGGACCAGGCGATAGCCTTTTCACCCTGTGACTAGACAGGTCCCTGAGGGCACGGCTGATGTGGCCAATCTTCTGTAAATGCAAAGGTGCTT
ATGGCCCTAGAGCTTCAGCTCTAAGACATGAAAGTGAAGGTTCCTCCAGAATCACACACGTGCATTATTCAGCGCAAAGATCTGTGGTTTGGTGATT
CTTCTTCTCCTTTCATAAGGTGAGAGGCAGCAGTTGGGGTGAATTTCCCCAGGAATGGTGGGAGATGTGGGCCTAGATCCTCCCGCTGCTTGGGAAG
AGTCGTACTTTTCAGTTGGAAGCCTGCTCCAGGAATGGCGGGCTCCACCCTCTGCATGTGACGTACAGGGGCTGGTAACTGATGGAGCCTGAACATA
TATCTGGGTGTGAGGGATAAGCTTCGAACGCCACTTAAGTGTAGGTGGGAGCCAAAAGGTCACCCTGCCAATACATGATTACATGTCCTGTTGAGGA
GAAAATACACAGGGACTATTTTCACCCTTCTGGAAATTGTGATTAGAAAATGCAAGGAGAAGGCCAAGACACTAAACTGGAGCTGGTAGGGAGGAAG
CCTCAGCCCTGCTCAGGGTGCCTGGACAGTCCCCACCAGGGCCCAGCTAGGAAATGCCAGCCTTGTCCTTGGTCTTTGTCCCTAATGGCTCCCGGCG
GGTGAGGGAACTGCCTGGGGATTCCCCATCGTTGAAGCGCTCTGTGAGTGACCCCCTCCTAAGCCCCTCCAGTAGGGGATTTCCCAGAATGTTCCCA
CGCCCCCAGGAAGCCTCTTCCTTAGCCACCCCCAAGCTGCTTGCGGTTCATGGTAGAGGTAGGTGGCATCAAATGACCCCACAGGTGAGGGATTTGC
CTGAGGTGGGAAAAGAGGGAAGATAAAATTGGAAAGCCACCGGGGCTGAGGAATTATCTCATAGGAGAGAACTGTCAAACAGTATAACGTTTAAACA
GACTTTAAAGGCAAGAAAGGATGGAGGGCACAGACTCTGAAGCCAGAGTGCCTCAATTCAAGTACCGGTGCTGCAACTTCCAAGCTGCGTGATCTTG
AGCCAGTGACTTAACTTCTCTGTTCCTCTGTTTTTCCTCTTCTGTAAAACGGAGATAATATTTTCTACCACACAAGTTTGTTGAAAATATCAAATGT
AATGATAACCATAAAATACTTAAAAGAGTGATTGGCACACGGAAGTATTCAATAAATGTTAGTTATTGGCCAGGCATGGATGATTCACGCCTGAAAT
CCCAGAACTTTGGGAGGCTGAGGCAGGCGGATCACTTGCGGTCAGAAGTTCAAAACCAGCCTGGCCAACATGGTGAAACCCCGTCTCTACTAGAAAT
ACAAAAAGTTAGCCAAGTGTATTGGCGGGCACCTGTAACCCCAGCTACCCAGAAGGCTGAGGTGGGGAGAATTGCTTGAACCAGGGAGGCAGAGGTT
GCGGTGAGCTGAGATTGCACCACTGCACTCCCAGTCTGGGCAACAGAGAGAGACTCTGTCTCAAAAATTAAATAAACAAATAAATGATAGTTAAGTT
AACCTAGGCTATTTTTTTAAAAAAATTTTGGTTTCTATCCACCTTTTTCGTATAAATTGAGCCAGGTTACACCTTAGACCTATTAGATCAGAATCAG
GCATCAGGATTGCTAAAGCTCCCCAGGGGACCCCAGTGTGTGGATGAGGTTGAGAATCATTGTTTTGGTCCAGTCTTTCCATTTTAAAGTGAGGCAA
CTGGAGCTGAATAGGGAAATCGAGTCACTGAGGATCACCCAGCCAGGACCAGGGCCCAAGTTCCTATTCCCATTTACCGCTGATGGAGCTCACCGTG
GTCATGAGTTCAGGACCTGGCTCTGTGTCTGGAGGAAGGTCTGGCCTCGAGTCAGCCCTTGTCCAGAATATCTGGCCAGGTGACCCCCTCTCCATGC
AGCCCAGGAGGCAGATGGTCAGCTCTATGATTGGAAGAATGTGAGTGACTCAGGGATCTTGTGTTGTGTTGTGTTGTGTGTGGGTCACCAAAACCGA
GACCCAGCTTTCTCCTGGGAGACAACAGGGTAGCCAAGGACTTATTTTTTTGTTTTGTTTTGTTTTGTTTTTTGAGACAGAGTCTTGCTCGGTTGCC
CAGGCTGAACTACAATGGTAAAATCTTGGCTCACTGCAACTTCTGCCTCCCAGGTTCAAGTGATTCTCCTGCCTCAGCCTCCGGAGTTGCTGGGACT
ACAGGCATGCGCCACCACGCCCGGCTAATTTTTGTATTTTTTGTAGAGACAGGGCTTCACCATGCTGGCCAGGCTGGTCTTGAATTCCTGACCTCAA
GTGATCTGCCCACCTCAGCCTCCCAAAGTGCTGGGATTACAGGCGTGAGCCACAGCACCTGGCCAACTTTCTAGTGTTCTCGGGAGACCTTTGCCCA
CTCAAGTCTCCAGTCTCTCGGGGGAAGCAGTCAGTGTGAGAGAAGGAACACAGGGCCCCGAGCCAAGCCCTGCTCTGCGCCTCCCTCGCGGGCAATG
AGTCTTTGCATCAAACACTCAAAGTTTCTGAACTTCTGAGAAAACAAGTGCCTTGAGGTGAATCCTATAGCACAGCTGTCACCAGCCTGTGGTCATT
TTGGAGGGTATGTGGCATAGGTTTGTCCCAGGGTCTCAGTTGTCCTCATCTGTAGAGTGGGGATAATAACAGCTGACCTTCCCTATCCCACACAGAG
CGTTATTGTGAGGAGTCTGATGGACCTGGATGAATTCTGAATAGGAGAAAGATGGGTACATGGATGCCCAAATGCAGGCTCACCCCCACCCCTCTCA
GTAGCAGAAGACATGCATATGGGAGAAGCTGCATTTCCTCCCAGCCTCACTGTGCTCTAGGTGTCCAGCCCTCATTGTTAGGGGATGTCACTGTTGT
ACCTCTGGATAAACAGCTGCTCTCATGCCACCTTTGCCAGTTGTCCCTTCAGCTGGGCGAGCCCTTTCCAGGGCATGACTGCCCCAAGGAGGGCCAG
AGGGGACTGGGCAATAGCAGGGACATGGAGGGACGAGGCCCCAGATCAGCCACTTCCTCCTGCAAGGGAAGTCAAACCCTTTCTCTCATAAGTGTCA
GGCTGGCTGCACGGTCCCTGGGCTGGCAGGGCAGGTTTCTTGGGGGCCCTAGCAGGAAGCACTCTTGCTTCCCAAGGTAAAGACAAGTTTCTTATCA
CTGGCGGTGGTTTTCTGGTTAGAGGCAGCAGGCAGCGGTTACAAACTTTGCCTAGAGCTCTGGGATCTGCAAGCCAGGGAGGGGGAGGCAGACGACA
GAGCTAGAGTGAGCTCAGCAGAGCTTGCTTAGGGAGGAAGGACCCGCTGTCACTTCCCGAAAGCTGGGCCAGCCTCTAGGCGGGGAGAAGGTCAGAG
TGGCCCTCCCTTCTGCCTCGGGGTTTGCCCAGGCTCTTCAGAGCACAGAATTTACAGTAAATGTTGTCACCAGTGGAAACTCTCAGAGGGGGCGAAG
AAAAGGGCTAGAGGAAGGAGCCAGGACTCCCGGCCCCCAGTTCCCGTCTTACCAACACCCCCTAGTCTCATCGTGTTGCTTGATCTTACCTTTCGGT
AAAGAGGGGATGCCCTCCTTCTGGGATGTGCCAGGAAATACCCAAATGGTAAAATGAATGAGCCGGCCACACCTTGCAGAAGGCAGGGCTGTGACTC
CATCATCGTGGCTCTTGATAACTCCTCTGCCCCGTTTTAGAGGGGCTTCCTTTGTACTGACCTTGGCACACTTTCTAGCTCAGAGCCCCATTCAAGA
AATGCCAGGTTGAGGCTGAGCATGCTTGTGTCTGTCCTTCACAGATGATGGAACCTGGCTTGATGAGCAAGGCCATGTTGGTATATGCTTCTCTGCC
ATTTAGAAAGACCCCCCCCAGGATGTGGGGTTTAAGATGATTGACAGTATAACCGATTAACCTCATTAGCCTACAGCTCATGCACCTGATGGATTCG
TTAGGGCAAATTTTATTTTATTATTTTATTTTATTTTTTGAGAGAGGACCTCACTCCATCAGTGAGGCTGGAGTGCAGTGGCATGATCATGGCTCAC
TGCAGCCTCCAACCCCTGGTGCTCCATAGCTAATTTTCTTTTATTTTTATTATTGTAGATACTGGGTCTCAATAATGTTGCACAGGCTGGTCTTAAA
CTCCTGGGCTCTCAGGAGGTAGAGGTTGCAGTGAGCTGAGATCGCACCATTGTACTCCAGCCTGGGAGACAGAGCAAGACTGTCTCAAAAAAAAAAA
CCCAAAAAACCAAAAAACTGCTGGGCTCAAGCGATCCTCTCACCTCGGCCTCCCAAAGTGCTGGGATTATAGGTGTGAGCCACTGCACCCAGCCTAT
TTAGGGCAAATTTTAAATGTCAAGTTATCTTACATCTGCTCACCACCCACCCTATTTTTGAGTTACCTTCTTCATTCCAGCAGATGATGTCATAAGT
CTGTCAGTCAACAAACATCTGAGTTCATACTATGTGCCAGGCATTGAGCCAGGCATTAACAAATAGGCATTTAATAAGTGCTTGAATAATTAAAACA
AATTTAAAATAATATTTAACTAGTGCTTTCCAACTTGCCTGATCATTAGAATGACCTGTGGCACTAGTTAAAAATCCAAATTTCACTCCCTAGTAGT
CTAGTGGCTAGGATTTAAAAAAAAAATTATTATTATTTTTTTAATTCAGCTCTGCAGCCAGGCATGGTGGCTCACGCCTGTAATCCCAGCACTTTGG
GAGACCAAGGTGGGCAGATCCCCTGAGGTCAGGAGTTCAAGACCAGCCTGGCCAACATGGTGAAACCCCGTCTCTACTAAAAATACAAAAACTAGCC
AGGCGTGGTGGTGCCTGCCTGTAATCCCAGCAACTCGGGAGGTTGAGGCAGGAGAACTGCTTGAACCTGGGAGGCAGAGGTTGCAGTGAGCCAAGAT
CACACTACTGCACTCCAGCCTGGAGGACAGAGTGAGACTGTCTCAGGAAAAAAAAAAAAAAAAAAAAAATTCAGATCTGCAGACTTCACTCCGCAAA
TCCCAAAACCACTGATTCACATTCCTAGATTTTAGGATGGGCCTGAAATTCTATTCTTAACAAGCCTTCAAATTAATTCTCATGATATGGCAAGTTT
GGGAAATACTGACCTAATCCAAATAGATTTAGAAAGGTAAGACCTGGTCTCCAAATATCAGGTTGCCTTTTGAACTGAAATTTTTTTTTTTTTTTTT
TTTTTGCATCTCCAATGATATTTGCCTTTCCTCTGTGGTTACCAATGCTTAGCAGAGAAAGTCTGTTTGGTTGAGTCGAATAATGTAAACCTTAAAA
TTATACCGGAATTGCGATCTCCTGGGCTTTCTGAGGATGGGATTGCTTTTCCATAATTGCTAATTACCAGATTGCAATTGTTGATTAATTAATGATG
TGATCAGAAATCAGCACTTCTTAGCAGGCATTTTTCTGATTAGCATGTATTTGATGGTTCCCCCAAGCAACAGGGAAAAGAGTTTCCAGAAAAAAGA
GAAGCTCACAGGCTTGGGACACCCCCAAAATACCGTCAGAATGCTTTCTGGTAGGCCGGACAGGGTGGAACAAAACGTTGTAGCAGACTTTGACCAT
TTAGTATTTATTTATTTCATTTTTATTTTTATTTTTATTTTTGAGATGGAGTCTTGCTTTGTCACCCAGGCTGGAGTGCAGTGGCATGATCTCGGCT
CACTGCAGCCTCTGCCTCCTGGGTTTCAGCAATTCTCTTCCCCGAGCCTCCCGGGTAGCTGGGATTACAGGTGTGCACCACCACGCCTGGTTAATTT
TTTTTTTTTTTTTTTTTTGTATTTTTAGAGACAGGGTTTCACCATGTTGGCCAGGCTGGTCTCGAACTCCTGACTTCAGGTGATCCACCCACCTCCG
CCTCCCAAAATGCTAGGATTATATAGGCATGAGCCACCGCACCTGGCCCCATACTATTTATAAAGACCCTGAGCATTCTAGAATCTGGGTGCAGTAG
ACAAGTATCCAGTGACTTTATTTGTAAGACGAAATGCAGACACCGGGAGCTTTTGGAAAACACGTGGCATAACACAGTGGAAAAGAGTGAAACTGGT
GTAAGACGTTCTCACAAACGACCTTCCATTTCCTTAGGCTCTGGCCTGCCAGCTGCTTTCCCTTGCTGTATTCCCGCCACCTCCCACCCACACACCC
TCACAGAGACCCCTACATGCATACACGCAGAGGAACACACTCACACACACCCCTCTATCAGGTTGAACCATATGAAATTGCTTTTTTGCCGGGAGGA
GAGATGTAGTCTTGCTGTGTTGCCCAGGCTGGAGTGCAGTGGCTCAATCTCGGCTCACTGCAACCTCTGCCTCCCTGGTTCAAGTAATGCTTCTGTT
TCAGCCTCCTGAGTAGCTGGGACTACAGGCGCACTGCCACACCCAGCTAATTTCTGTTTTTGTATTTTAGTAGAGACAGGGTTTTGCCACGTTGCCC
AGGCTGGTCTCAAACTCCCCACCTCAGGCAATCCGCCCGCCTCGGCCTCCTAAAGGGCTAGGATTACAGGGGTAAGCCACCGCGCCCGGCCTGAAAT
TGCTATTCTTATAGGTCACAACAGACAAATATCAGCAGCTTCACGTGGTTCAGCCTCATATCTATGTGTATACATGCACACCCACCCATGTGCTTAC
GTAAACGCGCCCATACACACCTACAAACATATATACACTTGTGCACACATTCACACGTGCAGGAAAATTCTCTGGTGCCCTTCTCCATGGCTGTGCT
AGTGAACAACTAATCTGGCCCCTCCTGTGTCCCTCCGCACCCCACCCACCTTGCCTCCTTCCTAGACACTAACCTCCGGTGCTGATCCCCACCCCTA
CAGGAGAGCGAAGACCTGGAGAAACAGAACGCGGCTCTACGCAAGGAGATCAAGCAGCTCACAGAGGAACTGAAGTACTTCACGTCGGTGCTGAACA
GCCACGAGCCCCTGTGCTCGGTGCTGGCCGCCAGCACGCCCTCGCCCCCCGAGGTGGTGTACAGCGCCCACGCATTCCACCAACCTCATGTCAGCTC
CCCGCGCTTCCAGCCCTGAGCTTCCGATGCGGGGAGAGCAGAGCCTCGGGAGGGGCACACAGACTGTGGCAGAGCTGCGCCCATCCCGCAGAGGCCC
CTGTCCACCTGGAGACCCGGAGACAGAGGCCTGGACAAGGAGTGAACACGGGAACTGTCACGACTGGAAGGGCGTGAGGCCTCCCAGCAGTGCCGCA
GCGTTTCGAGGGGCGTGTGCTGGACCCCACCACTGTGGGTTGCAGGCCCAATGCAGAAGAGTATTAAGAAAGATGCTCAAGTCCCATGGCACAGAGC
AAGGCGGGCAGGGAACGGTTATTTTTCTAAATAAATGCTTTAAAAGAAACCAGTCTGACAAGGCAGTTTCTCTCTTTCACCCTGTCCCTTGACACTC
TAAATTCTGCGATGTTGGGACCTTCTTTGTTTTTTGGACTCTAGTACCCTCAAAGAGCTCTAGGGACTCCACTAACAGCTCCTCTTTTCCATGGTTT
ATTGATGTACTTGGGAAGCTTTCAATTCCTTCTCTAGGTGTCTCCTTCTCCTTCTCCTTCTCCTCCTCCTCCTCCTCCTTTCTCCTCCTCCTCCTCT
TCTCCCCCTTCTCCTCCTCCTCCTCCTTCTTCTTGACAGAATTTCTCAGATCTTGGCTCAGGCTGGAGTGCAGTGGTACGATCTCCGCTCACTGCAA
CCTCCGACTCCCAGGTTCAAGAGACCCTCTTGCTTCAGCCTCCCTAGCAGCTGAGACTACAGGCACGCACCACTATGCCCAGCTAATTTTTTTATTT
TTAGTAGAGACAAGGTTTCACCATGTTGGTCAGGCTGGTCTCGAACTCCTGGCCTGAAGTGATCCACCCGCCTGGGCCTCCAAAGTGCTGGGATTAC
AGGCATGAGTCACCATGCCCAGCCTAGGTGTCTTCTGGATTGCCCTCCCATGCTCCCCTCACGGTGACCTCCCACCTTCCATTCTTCACTGCTTTCT
AGACCATGAGCAGGTTGTCCCCTAGTCCGGGAGAAGGCCCAGTGCAGGATGGCCTCACCTGGTGAGGTGGTAAGTCAGGTTGACCTTCTCGTCTCCC
ACTCATGACTCCACTCACCCAGCCAACTGGCTCCATCCTGACAGCCAAGTCTCCGGATGCTGCAACCAGGCCCTGTGCCAGGCTGCCCTTCACATGG
AAGGCGGTGTCTTCCTAATGCTCTCAAGGGGCAACATGCAGCTTGGGTCCACAGGGACTTCTCTGCCAGTGGTGTACGTGTCCTGCTGAAGACTCCA
CCTCCCTTAGAAGGCGGTGATACAGAGCACAGGACTTGTCCTGTCCCCGCAGGGCTCCGCAGGCTGCCATTTGAGCACTTTGAGGGCTCAGGGAACA
CAGGGTCATCTTCAGTTTGGCAGAGCCTGAAACCAGCATGCTCCACCCCCCTGCTCTTCAGAGATCCCCAGGCCAAGTGCCTGCTGGCCTGCCTGAC
ACAGCCTTACCCACACCACTGCCCACGAGCAAAGCCTGCAGCAGGGCCTGGCCACACACAACCCCTGCTGAGCCAGCTGGAGACAAAAGCAACGGAG
ATCATTGTGCCAGGCGCCCACCTGATTGAGCTCCTTCAGTAGCCACCCTCAGTCTCATCCATTTGTCCTTTAGAGGGACAGCCTCTGCCTGCTGCCT
CCCCGGTGGCATCCCTCATGGGGTGACAGAAGGGAGGAGAAGTCCTGCTTCCCTGTGTCAGTGCCCCCTGAACCCGCTGGCCAACCACTCTGGCCGG
TTTGAGGCCAAGTTTCAACTCTAGACCTCCCCTGTGTGTGTCTCTCCTGCCCCTCTCAGATGATGCCAGTGTTGGGCTATTGTGATTATTAAATGCC
ATAGAAGTTTGGATGAGCTGCATCCCAGCAGGTGGTGGGGTCACAGCCCCTTGGGAGGAGTCCAACCCAACAGCCTCTGATGGCACATTGCAATCTT
TGGGGCTCTCACCAGAGAAGCTGGTGCCCATGGGAGCCTAGGATGTGGACACTGGGCTGAGCCCCGTAATTCAGAGCCTGGGAAGACAGCCCAGAAG
ACCTTCCCTGAGTGCTGGCATTTCTCCCAGCACAGAATCTTGCATTGTAACCTTTGGTCTCCCAACGAAACGTGGCAAAACAGGCTCCCCTTTCAGT
GCAGAGCCTCCATGTGGACTGGGCAGATGTGTCATGAGGAGGAGCTTTCTTAATTTCCTTCAGAACCTGGATTTTGGTAGCTAACGCTCTGTCTAGC
TCTTTCCCACCCCTCTGTTAACGAGAAGAGCAAAGAAGCCGATCTTCACTTCAGATGTTGCAGTCATAAAATATAATTCATTTTTCTTTCATAATTA
TTATTTTTTCTTTTTTTGAGACACGGTCTCACTCTGTCACCCAGGCTGGAGTGCAGTGGTGCAATCATGGCTCACTCCAGCCTTGACTACCCACACT
CAAGCGATCCTCCCACCTCAGCTTCCCAAGGTGTTGGGATTACAGGCATGAGCCATTGCACCTGGCCTTCTTTCACGATCTAAAGACGTAGAACTTT
GAGTCCAGCTTTCTTTGCTACTATCTCTGCCAGGGCCTGGCCTCTTGTGGGCAGGCTTTCTTTGAATCAGAGATTTTCATCTCCACCCATGCTCTAG
CACTGTGATTTTCCCCAGAAACCCCCACAGAAGGCACATGACTTCTGCCGGCATCTTCTGAATGACATTCAGGGCCAGAACTAGAAAAGCAGAGTTC
ACGTGCACGGTTCCCATCTCTCAGCAAGGACTTCTCTTCCCCTTTCATTCTCTACTTTCTACTGACCCCAGGCAGTTCCACTTCTCCTGTCTAGTCA
GCCCGGTAGAGGTAGCAGGTAGCTGAGCCTGGAGCTGGTGCCAAGGCTGACTTCATGTCCATGCAGGCAAATTGGAGAGGCAGCCATGAATAGAAAT
TTGAACATCCGTAGCTTTAACCTTGGATGTTTCACCAACCAGGTTCTGTCCCAGCCTTCTACCCATGACAGGGATGGCTCCCTCAGGCTGGTGGGCC
ACTTGACCCACACTCAAACGCCTTCTACCCAGGCAGGCACTGTGAAAGCATGGGACCCACTGGATGTAGGGCAATTGGGAGTGGTGGAGAATGTGGC
AAACTAAGGAGAGTGTGCAGCTGTCTGTCGTTCAGTTCTCTCCCATGGTGCCATGTGGGAATTTAGGCCTGGGCTTGCCATGTCTTCCAGTTTGTCA
AGAAAAGCCAAAATCAGAATTTCTACATGAAATCTCTCAATTCTTTTTTTCTTCCCTTCCCTTTCTTCCTCCCTCCCTCCCTCCTTCCTTCCCTTCC
TCCCTCCCTCCTTCCCTCCCTCCCTTCCTTCTTTCTTTTTTTCTTTCTTTCTTCCTTCCTTCCTTTTTTTCCTTTCTTATTCCTTTCTTCCTTTCTT
TCCTCCTTTCTTTTTTCTTTCTTTCTTTCTTTCTTTCTTTCTTTCTTTCTTTCTCTCTTTCTCTCTTCTTTTCTTCTTTTCTTTCTTTCTTTTCTGA
CAAGGTCTCACTCTGTGGCCCAGGCTGGAGTGCAGAGCTGCTGTCATAGCTCACTGCAGCCTCGACCTCCTGGGCTCAAGCAATCCTTCCACCTCAG
CCTCCCAAGTAGCTGGGACTACAGGGGCATGCCACCACACCCAGCTATTTTTTTATTTTTGTTTTTTTCATTTTTCTGTAGCGAGGGGATCTCATTA
TATTGCCCAGACTGATCTTGAACTCTTGGCCTCAAGCCATCCTCTCATTTCAGCCTCCCAAAATGTTGGGATTACAGGCATGAGCCACCACATCCAG
CCCATGTGTCTAAATAAAATACTTAAAACATTATAAATCAAGCTTACAAGTTGTTAACAAAACACATTCTTTTCTTCTTCCTTGACAAGGATACTTT
CATCACAACCTAAAAGGCCAAGTTTGAACTCAGAATTCTTAGACACTTCAAAATTTTATATTAGCACAAGGTAGTGAGAAAGAAGCAGTACCCGGAC
TGCAGCTTGCCGCTTTCTTGCCCTCCCCTGGTTCTTCCTGTACCACAGCAGCCTCCAGTTCATGCCGGCGGACATGCCAGCCTGGAAGACCAAATTC
CGTCCACATTCACCCCCACAGGACCCATCCCTTGGGTCCAGAGATGCACATACCAGTGGTCTGGTCCACACTCGGGAAGAAGTATCCAGGGAAGAGG
CTTCAGCTCCTGGAAGCCAGCCCAGGGCCAGTTACTAAGGGGATTCTGGTGTCCTTGGAATGTTGGGCACAGTCTAAAGGGGGACACAGGGTTCTAG
GTAGGTGTCTCCTTAGTTCTAAGGACTTTTTGCCCCAACAAGAGGAGCGTAGCAGGAGGAATGGCAGTGCTAGTCCCTGCATTGTCGGGAGTTCAGA
GCAGAGACGTCTTTTGTCCAGGTCTGAAGGTGGCACTGCAGAGACCTGCCCATTTGCAACTCTGATCTAGGTCAGCAATATCTCCTGGAAAAGCCCA
GGCTACAGGAAGGCCCTGTGTAGCAAGAAATGGACACAAGACAGCGTCGTCAACATCTGTCACATTGAAATGCGGGTTCCTGGAGAATGTTAGTTTC
CCCACCTGCCATCCTCTGCATTTATCTCTTACTAGCAGTGTCATTCCCTGAGTGAGTGTCAGAGCAAATTACGAGAAAGCCAGATCTTCAGTCCTCA
GGATGAGAAGTGTGGGTGGGGAGAGAAAGGGAGGCAAAGTCAACTCAAAGGTCACGAAGTTGCCGTCTGCTGGACCAAAACTTACCAGCAGTTTATT
AATACCTCCAGCCGATGTTACAGTTGTGGCTTTACGGGGAAGGAGGTGAGACTACTGGATGCCCCACTTCTCTTGGGGACAGATAGGCTATCTCTAT
TTCTCTTCCTTCTTCCCCACGGGTTCAGTGCTCCAAAGCTGCTTGGGAATTCCAAGGGGGAGAAAGGGCTAGTGAACTAAGATCAACACCAACGTAG
TAAAGATTTAATACTCTTGTTTCTGCCAGAGGAGACTGTCATTTTAAGAGACACCTAGGAGCTCAAGGCTATAGTGAGCTATGATTGCATCACTGCA
CTCCAACCTGGGCAACAAAGCGAGATGCAAAACCCTGTCTCTAAAACAAAAAAGAGAGATGCCTAGAGAAAGTAACACTTGACCCAAAGGAAAGAGT
TTTTATGGTAGCATTTTAGGCTTTGTAGCAAGTGAGCAGAGGAGATATTTAATGGAATTCTTGCCATGGGAATGACATGTGACTGCATTGGCCTCAT
GTAGATACCAGAGGAGTGGGAGATGGGGATGGGAGGGAAAGAGAGATGTAGCCCTTCTAAAACTCTTGTGGGTTTGTGTGTGTGTGTGTGTGTGTGT
TTTTTTTTTGACTGAGTCCCACTCTGTTGCCCAAGCTGGAGTGCAGTGGTGCGATCTCGGCTCACTGCAACCTCCACCGCCCGGATTCAAGCAATTC
TCCTGTCTCAGCCTCCTGAGTTGCTGGGATTACAAGCATGCGCCACCACGCCCAGATAATTTTTTTTTTTTTTTTTTTTTTTTTTTTTTGTGGAGAT
GGTGTTTCACCATATTGGTTAGGCTGGTCTTGAAAAATCTTGTTTTTTAACCACCTGATATGTGATTTAATTTAATCACTTATAGGAAGATAAAATA
AAAACCTGATCCTGGTTTGAACAATCTACTGGTAGGTAGAGATGAAGAGCCCCCTTTTAGAGGACTTCAATAGGAAAATTTGCACAAATACCTTTGC
TACCCAGGAGGTTTCTTTGGCTTCCTCTGGAAGATTCCTGTAGACAGATTGCTGAGTTTGTCATTACACCTAGAAACCAAGGCTAGGAGGGGTAGCT
GAGACTGATAATTGCCCTCCCAAAGCTATTCTTCCATTTTTCCTTACTACGGAACTCTTGTTTTGTCTAAGATGGCAATATGCCTAGAGAAAAGATT
ACATATCCCAGATTCCTTTGATGTTTGGGATGGCCATATGGCACAGTTCTGGCCAAAGAGATATGCAAGAATTTGCTAGGTAAGACTTTTATGGGAA
AGCTCTTCAAAAGGTGGGGCTGTCTCAGTTGGCACATGCCTTTCTCCTCCTTTCTGTCTGGAAGGCAGATATGGTGTTAGAGGTGAAGCAACCGTGT
ACACAAAGGAGGAAGAGATTCTGCGTCCCTGGTAATACTGCAGAAGTGTGAAGATGATAGAAGCTCCAGCTGGCCCACCTCTAGACGGCTTCTAAGT
GAAAGTGGAAAAGAGTTTATTTGGTTACATCACCTTGAGTTGGGTTTTCTAAGTGCAGCTTAACTCAATTCTGTCTAATGCAGGAGCCAATGGAACA
ACCAAATAAGGAATTTAAACAATTCCCCTAGCTCAGTGGTTCCTAACTGGGGGTGATCCTCCCCATTCCCCAAGATATTTGACAATGTCTGGAGATA
TTTTTAGTTGTTACAGCTTGGGAGAGAGGTACTAGTAACATCTAGTGGGAAGAGGCCAGAAATGTTGTTGCTAAGCATGCTGCAATGCACAGGGCAC
ACCCCACAAACAATAATCCAGCCCAAAACATCAGTAGTACAGAGGTGGAGCACCCCTGCAGCTGGCCCTAGTGCTTCTAGGGCACCAGCCCATCAGG
CCACCAACCTACCCTGACACGCTTGTCCATCCCTCTCTCAGAAACAAACCCTGTGTATTGACCAGGCTGAAAAAGCCACGTCCTTCACCGTATCTGG
CACTTTCCTCTCTCTAAGCCTTTGCTCATGCATCATTTCCTCTGCCTAGAATCTCCCTCTCATCTTTTCAGGTGGGGACCATGACTCTTCATTTTTT
TTTTTTTTTTTTTTGAGATGGAGTCTTGCTCTTGTCACCCAGGCTGCAGTGCCGTGACGCAATCTTGGCTCTCGGCTCACTGCAACCTACACTTCAC
AGGTTCAAGTAATTCTCCTGCCTCAGTCTCCTGAGTAGTTGGGACTACAGGTGTCTGCCACCACACCCAGCTTTGCTTTGTGTTGGGAACATTCAAA
ATCCTCTCTTCTAGCTATTTGAAAACATACAATAAGTTATTGTTAACTGTAGTCACCCATCAGTGCTAAGACACTAGGACTTATTCCTCTCATTTAG
CTGTAATTTGGTATTCTTTAACCATCCTCTCATTATTTCGCCCTCATCTCTGCCCTGCCTTTCCAGCCTCTAGTAACCACTATTCCACACTTTACTT
CTATGAGTTCAACTTCTTTAGCTTCTGCATGTGAGTGAGAACATGTGGTGTTTATCTTTCTGTGTCTGGCTTATTTCACTTAACATAATGTCCTCCA
GGCTCATCTATGATGCTGCAAATGACAGGATTTCATTCTTTTTTATGGCTAAATAATATCGCATTGTGTATATGTACCACATTTTATCTGTTCATCT
GTTGGTGGATGCTTGGGTTGATTCCATATAGTACTTTGCATTGTTGCTTTTTAATGTGCATAGAAGATAAGGAATACAGGAGTAAAAGAGTTTGGAG
GCAAAAACTCAAACTGTGTTTTTCCTCTGCTCTCACACCACTCTGCAATCAACACAGATGACTTCTGTGACCAAATGTGGGGAGTTTTCCCCATACA
CCGAGCAAGCAATCAGTTCTGCAGCAGACACCAGCTGAGTATCCTCCAATTCAGTTCTGACCCTGTCTGCCTGGAGATAGCATCAGCTCCTACAGGT
TGAGAGCTCAATCCCACAAGACTCCAACCAACTTCAGATGCCAGTCGCAAGTCCAGGCATCCAGAACTTCTGGCCACTGGCTTCAAGTTAGGTTCCC
ACGACCCTCTCTTTGGATTGGACAAATGTGCTAGAATGGCTCAAAGAACTCAGGGAAACACTTACATTTACTGGCTTATTATAAAGGATATTGCAAG
GGATACGGATGAGATGCATAGGGTGAGGTACGGGGGAGGGGTGCAGAGCTTCCATTCCCTCCTTGGGTGTGTCATCCTCCAGGAATCTTCTTGTGTT
CAGCTATTCAGAAACTCCCCAAACCATGTCCTCTTGAGCTTTTTATGGAGACTTCATTGGAGAGCCATGATTGACAATCATGTAGAAATGCAACTGG
ACAAAAAGGGTCCAATTACATGATCTAGTATGAGTCACATGATCTAATACTAACAGGGTAAGCAGAGAAACCCAGCAAGACCTGTCTGTGCAGATTC
TTTTTGGCCTCTCTGTGTAGCATTCCTTCCTTCAGGGTATGCAGCAGGACTGCTTCTGAAGTGAGGGTCTTATGACCACAATCAGAAAAGGGGAGGA
AGATTAGGGTCCTGCTTTGCACTAGGGAAAGAAGGGCAGAGAAAAGTCAGAGATAAATTTTGTTTTTTAAGGCCTGCCTCTGAGGACTGAAGTGCCC
AACATTATTAAAAAAAAAAAAAAAGACTGTAACAAGGTGTTATATCACAGAGATAAATAAGACCTCTGTGTTATCCAAACCCAAGATTGGCTGTACT
CTTCTTTTGCTTAAAAAACATATATATTTAAATTAATAAAGCTTGGCAAATATAGAGTATAGACACTGAAGTTTGGAGGCCTACAAGCATTCATGAA
ATTTCATCTTTTCATTTTCTCAATAAAGCATCTCTCTCAATCCATTTGTGTTGCTATAAGAAAATACCTGAGATTGGGCAATTTATACATAAAAAAG
ATTTATTTGGCTCTATGGTTCTGCTGTCTGGAAAAAATCGGGCACCCGGTGAGGGCCTCAGGGTGCTTCCACTTGTGGTGGAGGTGAAGGGGAGCAT
GTGTGTGCAGAGATCACACAGTGAGAGAGGAAGCAAGAAAGAGCAAGATGGAAGGGGCTGGGCTCTTTTTAACAATCAACTCTTGTGGGAACTAATA
GAGTGAGAACTCACTCAACCCCCACCCCAGGGAGAACATTAATCTATTCATGAGGGGTCTACCCCATGATCAAAACTCCTCCCATTAGCATCCCACC
TCTGAGTTTGGGATCAAATTTCAACATGAGGTTTGGTGGGGTAAACATCCAAGCTATAGCAGCATCCATGTGTGGAAAGTTAAGAGCATCTTTTTTT
TTTTTTTTTTTTGAGACATGGTCTTGTTCTGTCACCCAAGCTAAAGTGCATGGCTCACTGCAGCCTCAAACTCCTGGGCTCAAGCAATCCTACCACC
TCAACCTCCTGAATAGCTGGGACTACCAGTGAGTGCCACCATGCCTGGCTAATTTTGTGTGTGTGTGTGTGTGTGTGTGTGTGTGTGTGTTTTCAAT
AGAGATAGGGTTTCACCATGTTGCTCAGTCTTGTCTTGAACTCCTGGACTCAAGTGATCCACCTGCCTTGGCCTCCCAAAGTGCTGGGATTGCAGGT
GTGAGTCACTGCACCCAGCCAAAAGCATCTTATCTTCTTTCTCTATCTTGTGGCATGTGAAGATACTGATACTAAACTTTGCCAATCATCTTTCAAC
TTGCAGCCATACACATAGGTACCCATTCCTAGGGATCAGCTCTTCATATCTGGGCCATGGGAGCTGTGAAATTAGATTGCGAGTCACATTAGCACCA
CGTCAATCCTCTCCACCCCAACCACCATTAGCACATCTTCTCTAAGTGAAGTCAGCATTATTCACATAAAATGTTATCCATTGACTACTGGTGCACA
GTGTGATTGGGGTTTATGAGTTACTCGGGGTGATTATATGATGAAGACTCAATTCTTAGTGGGGGCGCTGGAGACCTTGCACCCTCTGTCCCCCAGC
TCACTTCATATCACCCTCTTTTCCTCTGCACTGGCATCTGTCCCTTCCCCAAATCTCTGCGTGCTCCCTCCAGCCCAAGAGCCTTGCTCATTCTGCT
CAGCCCTAACTGAAATGCTCTTACCCTTCTAGCTCATTCATTCCTACCTTTTGTCAAATACCAGCTTGGGGAAATTTTGCTTGATTCCCAGGCTAGA
TCAGAACTGCAATTTCAAATAGTTTCATAGCACCTCATGCCCTTCCTTTATACCCATTAACACAGACTGAAAATTTACATTTATCTATGTGGTTATT
TGGTTAACATTTGTCTCTGTGACTGGACCATCCATTCTATAATGTCAGGGATTGCCAATGTTTTGCTCACCATTGTATTCTCAGCTCCTTGCACAGT
AGCAAAGAGCCTACCACAGAGTAGAAATTCAATAAATATTCATTGGCTGAATGAATAAATGGATGGATGGATGGAACACAGTGCCTGCCTTCTAGGA
ATGTAAAATCCAAGCCAATTATTATTCTGACGATGGAATACAAATGACAAAATAAATATTCAGTTAACATATAAAAAGTAAGAATCAATCAGATATT
TTAAGAGCAGGAATCAAGGGAAGGCATGTATTCTTGTGAAGATG
HUMAN SEQUENCE - mRNA
CAAGAGAGAGAGAGAGGTGCAAGCCCCAAAGCGAGCGACATGTCCCTTTGGGGAGCAGTCCCTCTGCACCCCAGAGTGAGGAGGACGCAGGGGTCAG
AGGTGGCTACAGGGCAGGCAGAGGAGGCACCTGTAGGGGGTGGTGGGCTGGTGGCCCAGGAGAAGTCAGGAAGGGAGCCCAGCTGGTGACAAGAGAG
CCCAGAGGTGCCTGGGGCTGAGTGTGAGAGCCCGGAAGATTTCAGCCATGCCTCACAGCTCCGACAGCAGTGACTCCAGCTTCAGCCGCTCTCCTCC
CCCTGGCAAACAGGACTCATCTGATGATGTGAGAAGAGTTCAGAGGAGGGAGAAAAATCGTATTGCCGCCCAGAAGAGCCGACAGAGGCAGACACAG
AAGGCCGACACCCTGCACCTGGAGAGCGAAGACCTGGAGAAACAGAACGCGGCTCTACGCAAGGAGATCAAGCAGCTCACAGAGGAACTGAAGTACT
TCACGTCGGTGCTGAACAGCCACGAGCCCCTGTGCTCGGTGCTGGCCGCCAGCACGCCCTCGCCCCCCGAGGTGGTGTACAGCGCCCACGCATTCCA
CCAACCTCATGTCAGCTCCCCGCGCTTCCAGCCCTGAGCTTCCGATGCGGGGAGAGCAGAGCCTCGGGAGGGGCACACAGACTGTGGCAGAGCTGCG
CCCATCCCGCAGAGGCCCCTGTCCACCTGGAGACCCGGAGACAGAGGCCTGGACAAGGAGTGAACACGGGAACTGTCACGACTGGAAGGGCGTGAGG
CCTCCCAGCAGTGCCGCAGCGTTTCGAGGGGCGTGTGCTGGACCCCACCACTGTGGGTTGCAGGCCCAATGCAGAAGAGTATTAAGAAAGATGCTCA
AGTCCCATGGCACAGAGCAAGGCGGCAGGGAACGGTTATTTTTCTAAATAAA
HUMAN SEQUENCE - CODING
ATGCCTCACAGCTCCGACAGCAGTGACTCCAGCTTCAGCCGCTCTCCTCCCCCTGGCAAACAGGACTCATCTGATGATGTGAGAAGAGTTCAGAGGA
GGGAGAAAAATCGTATTGCCGCCCAGAAGAGCCGACAGAGGCAGACACAGAAGGCCGACACCCTGCACCTGGAGAGCGAAGACCTGGAGAAACAGAA
CGCGGCTCTACGCAAGGAGATCAAGCAGCTCACAGAGGAACTGAAGTACTTCACGTCGGTGCTGAACAGCCACGAGCCCCTGTGCTCGGTGCTGGCC
GCCAGCACGCCCTCGCCCCCCGAGGTGGTGTACAGCGCCCACGCATTCCACCAACCTCATGTCAGCTCCCCGCGCTTCCAGCCCTGA

[0299] TABLE IX

MOUSE NOMENCLATURE
ICSGNM Irf4
Celera mCG4922
HUMAN NOMENCLATURE
HGNC IRF4
Celera hCG20902
MOUSE SEQUENCE - GENOMIC
ATGCTCATCATCCTTGAGGGCACACCTCCCTTGCTTTTGCCCTCTGAATCACAGCCTTGTCCTCCTTCAGCATGTCCTATCTTTCCATATTTTACAC
CTCTATCCAGGCTGGTTTTTGCAAATTTGCCTGCCTAAAATTCCAGTCGAGCTGTATCACTTGTAAGGATAAACTACTAATATATATGCCTTGCCTG
TTCTCTTTCACTCATGAATGAACAGTCCTCACACTCCTATCCCCCTAATATCTAACAGAGATGCAGCTCCCAAACTCTACAGCCTGAATCCCAGAGC
CTGAGCTAGCCCACGAATGCATCCAATCCCTGTGGTGCAGAAGAACCCATGCTCTGTCCAAATCAATCACCTAAACGGTTTAGAATTTCTCTGTGGT
CTTCTCTTTCCAGTGCCTAGGTCTCCACCCCTACCTCTGACTGTTTTTTCTTCTACTAGCATCCCCTGTCATACTCTTAAGATTTCTCAACCATTCT
AGTCGTAACCTAGCCTGTTCTTTTCCTTCATGTCTTATATTGAAATTCTGTGACTCTGAGGTTCAGAACAGAAGTCTTCTTGCTGGGGTTGCCTATG
GTECTCTCAATCATTTCCACTCCTTCCCTACTTGGTACTTTCCCAGAGAATGATACCTTTTGGGCAGTGAGTGATATATACCCAGTACTAAGCTGAG
TCACTGTCAGCATACTCTTTTAGGCAACCCTGGGTCTTGGCCATGCCTCATTGCCTTTTCCTGTGCCTCACAGGAGATAGAATAAATCACAGGACTT
TGGAGAACGTCACAGTGGTCCATGCAGTTGACCCTTGTAGCTTGAGCTTTGGGTCTCAGAGTGCCAGAGCAAGGGAAGATAGAGCACAAAGATGTGG
AGATGTGGAGTCACAGCAACAGTGTCACCAATTCTAGAACTATAGTTGCAAGCACTACCTCTGCTGAAGGCAGTTGAATACGAGACAACATATCATT
GGCCTTTGGAGCAATGCTCAACACCACCCACGGCAGGACACTTTGCAGAGCAGGGACATGGAGAAGCAGAGAGGTGTTCGCTGGACTTGGGAAGGAT
GCCTCGTAGCACAAAAGAGAAAGGAAGAGTGTATGAAGGGCAGGCTGGATCTTCCAACACAAGAGTAGGGGCACCAGCTTACTTGTCTTTTAAAGGC
CTGCCAGCACAGTGAGTCCACATGCCCTGGAAAGTCATGTTTCTTCTTAGGTTATATTGTGGCATGCTGGGATGCTTTCTCCTGCTGGGCAGATGGA
AAAGACAGTAGATGGTTCTCCTTGTAATTTTTAAGTTTCATCTGATGTTGAATTACCCCCCACCCCCCAGGATGCCTGAGTTCTACTCAATAAAGGA
GGGGCTAATTTAAAACATATTAAAAGTCAACACATTAAGTTTCCAACGTTCTGTGTAGCTCATTCCCTCTAAGCATGCCTATCTGCAACCCAGAAGA
ATCCATTGTTTTGCATCTGAACACACTATCAGGGACTACAGTGCACCATGACTGTTCTAGGTCTAGCAGAGTGTATCTGGTGAAGAAGTCTGCTAAG
AATACTCGCTGCTGGCCCTCAGGGGCTTTTCTTCTGTGTGGACTGGTTTCTTTTATGCTCAGTGGATTATATCAAATAAGAACAATATATTCTGTAA
TCACAAGTAGTCAAGCCTGTGTACTTATGCAGAGGAAACTGCCTTTGGATCATGAGTTTGTAAAGAGTTGAGGGAGAGGCACAGTGTTTAGATCAGA
AGGTGATCTCCAGATGACGTTTTACATAGCCCTGGTTAGTCTGAGCTGAGGAGGGGCCAGGTTTCCTTCAGTCGTGCTGAAGACTTCAAAGGCTGGG
CAAAGAGACCTTTATAAGAAGATGCTTCTCAAGGCACATGAGAGAAATAGTACAAGGAGACCCGGAAGGTAGAGAAAGAGGAAAGGAGAACAGACTG
GCTCACATGCTCAGAAGTGAGGACGACTCCATCTCACAGGGGAGTGCAGGGCATTTCTGAACAAGTTTGTGCAATTCATACTCCTTGTGGTGGCTAC
CTGATATGAAACAACAACACATTTTATATAAAATAATCTAAATCACATGTTCCTTTAGAGATTGCCAAAATGTTTTGTATACTGTCGAAAACTAAAA
ATTGAATGTCCACAACATGACCTATGTTCATGCCTACAACTCCATTAGTACTTTCACTCAGTCTTTAACGTTTTGTATACTGTAAAAACTGTTCCTA
AAATTTGAATGCCCCCAACATGAGCTCTGCCCGTGCCCATAGCACCATTAACACTGCCACTCTGTCTTTCCAGAATTCCAAAGCTTGAGACAGAATG
CCTGAGGAACATCAAAATGCAAAGCTTGATGAGTACCTGGCCTTCCTCTGTAGTAGCTTTAAGGGAGACAAAACAAGCACCCTTTGATGGACTCCAT
AATTGTTTTACTTACTCTTGGACCATGGAAACAAACTACAGATGGGGCCATGGGAACAAACCACAGATGGGGCCTGAAACCTCCTCTGAGAAGGGAC
AAGTGGAAAAGGAGACACCAGATGCTCGAATATCACATTAGTTTCTCTGTGAAAGAAGGTGGTCAATGTGGGTTGCAGGTAGGGCAAGGGCATTGGT
AATTGTGAACCATGAGGTATAAAACCAAGGGGACATAATACTTCTAAGCCTGACTTCGTCTACTTGGCTGGGCTTCTCAAGGACCAAGATGAGTCTG
AGGAGAGGAACAAATGGAGGTAGACAAGGGGATCCCATCCTGGGGGGTCAACCAAGGGAGGTTACATCAGCAGGCCAAAGCCTAGAAACACAGGACA
GTCTCTAAGTGTGGGGTCAGGCTGTCCTCAATCCCAACTGGTTTCATTGCCATCTGGGCAAGTCCAGGTGACCTCCCTGATGCCACCATATCCTTTT
CTGAAATAAGACCATCGTCCTGCCTCACTTCCCTACCTGTTCATAATAAGAAGTGATTGAGAAAACTGTAGTCTGGTACAGTACAACTTCTCTTTGG
AGTAGCAGACATGAAGCCCATTGTCTGCAGGCTGCCACTGAGCTGAGGGCTGGGCTAACCTGGGATTTTCCTCTACCGTGCCCAGCCTGGAGGAGTT
CAGTACTTCTAACAGAGTTCTACTCATAGGTGGTTTCTCATATGGTAGTTCCTTTGCCCTCTCTGACTAGCCTCATGCCTGTGTCTACTGTGGAGAG
TATCTGCCAAAATCTCAGGGAGGTGCAATGATCTCACCCAAGTCATATGTCATTTGCTGACACTCACTGGCTTATTGCATTATGGATAAAAGCACAC
GAGACACGCATGCATCAAAACATTGTACAGCTCCCCAGTAGTACACACAATTGTTATGTGTGGGGCTTTTTTAATCACCTAAAAGATAAGTTTAAAA
TGAAAAACGTTGATCCCCTAATGTGGGAAAGAGCTTGTGTCTATTTGAATGACATGAGAGCTAAGACTGCTTTGGATCAGAAACCACATCCTTTGCC
TCTCTCTCTGCCTCAGCAGAACCAAAGAAGCTCAAGAGACCCGTTTCTGTGTGCTCACGGTCATCAGATACAAGCAACGAAAGTTCTAATGCAACTG
TGAAAGTTTCTCTTTTTGTCCCTTGTTGTAGGATAATCTGCATTAACAAACTGTCAAGATGTTGAAAAGGAGATGTGGGGGAGAAGGGGAGTGAGAC
AGGACAGGGAGGGGAAGCAAGCAGGTGAACTCTACACAGAAAATAAGAAAGGTAGAAATTCCCTGCACTGCACTGCCCTGTGTGGATGCACTGTCCT
GCATGGATGCAGGAGAAACAGCCCAGGTGGCCCTGGGGATGAAGGGCTCTTCCTTTGCCTGCAGAGGGAACTGCCATTCCCAGGGGCCCTCAGCTCT
TTCTATGATGAAAAGGATAGTAAGGCTTTCCTTCTGCAAGTCACCAGTGCTCAGATTATCTGCACCTCTCCCATCCCATCCTCTGGCTGTCCAGAGA
GCAACAGGCAGGGTCAAGGGACTAGATGGCCTGGCTTAGGCTGTGCTGTGCATAGTAGAGGCCTCTACAAAAAGGACTAACAGTACAGATGTCTCCA
AATTACCTTAGTTAGACTTTATATCTTTAAAAAAAACTATAATGGCATGAAAATGATACACATCCATTAAAATTATCCTTCAAATTCTGAAGACAGG
CAGTTATTGTTCATACAATGCAGAGGGCCATGGGGACCCACTTGGAGACCCTTAGTTCTTGTTTGGCAGTGTTGATGGGCAACTCTAAAGGTAAGTA
TGGAATCTTTTGAACAAGGGCTTGATGGACAGCAATTCAGGTTCATCATGGCAAAAAGCTTGTTTTGTGATGTCCTTGGTTGAGCAAAGGGAGAGGC
AATCTACTAGCCCACTTTTCATGGTCTCCTTAAATGCCTGAAACAAGAGAGAGAGAGAGAGAGAGAGAGAGAGAGAGAGAGAGAGAGAGAGAGAGAG
AGGGAGAGAGGGAGAGAAAGAGGGAGGAGAGAGGGGGGAGAGAGAGAGAAAACACAAATATTTATGTTCTATGAAGCTACTTTGTCTAAGATCTATA
TGTATATCTGGGTGCTGTGATTTGAATATCATATAAATGTATATATGATATTCAAATCATATATACATATATATTTATATATGTATATACGTATATG
CATGTATGCATATATGTGTGTATATATGTGTATATGTATGTATGTGTATATGTGTACATGTGTACAGTGTGCATGTGTGCATGTGTGCATGTGTGCA
TGTGTGCATGTGTACATGTGTATATATGTATATATGTATATGGGCTGGGAGCATGATGCTTACAACTACTGAAGAGGTTGTTTTGCTGAATCATAGC
ATGACACAGGACACTGTGTGGTGATACAAAACAAGCAGCTAGCTAAAGCCTTTCTTTTTGATAATGCCTCTTCTACTAAGAAGCTTGCTTAGGACTC
CAGCCAATTCTAAAGACCCCACCCCTACCAAATGCATTTTCACTGAGGAATTAAATTGCTAACCCACAACTCTGAGGGAGGAAACATTCAAACTACA
GTATCTGATAAACATTTGATCCTCAGACAAAAGAGTTTCACATATTACTTGGAGCATACTTAAACTGTACAATTATACCCATTTTATCAGAAAAAAA
AATCCAAATATAATTCTGAATTACACGCTTTTATGTACCACAACTGGCAAACCTGCTCCAGGCATAGAGGTAGGCAGGATGCCTAAGGGCGCGGCCC
CTGGAAGGTGTAACAGAAGTGGATCAAAGCAGAACAAGGCACAGACTTTGGAGGACACTATCTCATGATAGCCAGATTTGTTTCGAGAGAGTGATAG
CTCAAGCCTTTTGGATATAAGACACTCAACCCATCATGTGAGCCTCCAACTCTGAGTCACACTTCCTCTGTAAGAGTCTGGGAAGTAGATTCCCCAC
GGTACCATTTCCTAATTTCTGCACCTGGATCTTCCCACACCCATCATTTGGCCTCAAGGCCTCTTCCTTACCGTTCTGTTTCCACCTGCCTGCTCTG
TGTGAGAACGTGTCTCTCTCTGTGGACTCCTCCCAGGACTCCTGGTCATTCCTCTCTGTCTGACACGGCCAACCACAGCCAGATAATTCCTCTTTGG
CTGGGGCTTTCATCTCCTAACAGTGGATGTGTGTCCTGGCGCTGTGAATAACTGATAATTGCCTGCACAATAAGCCAGTGTATGTTTCTTCCTGAAT
CCTTTCTCTTTGACTGTGATCAAGCATGTGCCAGACTAACCGCTCCTGAGTAGCCCATAGGAACAAGAAGGCACTCACACCCCGAGCCTCAGGTTGA
CCATAAGCAATGCAACTTTCCCTGAGACATAATCTCTACCGCCCCGTGTGCCCCAGCATCACTCCTGTGTTTTACAGTGTTCTGCTGAAAAGAAACA
TAGCAGATACAGTTTAGAATAATCCAGAGCCAAGCCACGTTGCCAATGGGTGAAATGAGACAGTGCCATTTGCCTTTCACCTCTTGCTTCAGTTTTC
GAAAAATTGTCCCCAGTGATTACAGAGTATTTGCATTTTTGTTGGCTTGGGAACGGGAATTGGCAGCATCAAGTGTTTCCTTGCTTAGAGCCACGTC
ACTATTTACGTAGCAAACATTACAAGTCAGAGAACGGAGCATTACAGGGAAACTTCTTAGAATGCTCACAATCAAAGGAGACAAAAAGGGAACAGTT
GGTTGTTTATAAACATGACGAAGGAAGAAAGGGACAATGTTGCTCTAGAGTCACAGACTTTGTGACTCCTTATTACATGATTGATGAAAATGACAAG
TCTCATCTTCTATAGGATTGAATGTGGTTTTTTTTTCTACCATATGCATTGACTCCTGGTATTAAATGTGTTCCCAACAACTTCTCCTCAATGGCTG
ATGATCTGGGGATGTTTGATACTGGAATTGTCTGAAGTCACAAAACACTTAGAGGATTTTTGCAATTTCAGTTAAGGTATATTCGGGACCTTATATA
AAATAAATAGTTGTATTGTTGCCCACAAATACATCACTTTACTAATAATGTTCAGTTTAGCTCTTGGGATCCATGCCCAGCTTTTTCACATGGATGC
TGAGAATTTGAACTCAGGTCTTTATGCTTGCAGAGTAAGCACTCTTACCAACTAAGCCATCTCCCCATACCCCTGACTTTAACCCAAAGTGGAGCAA
ATAGATGCATGCATGGGTAAGACAGGTTCACAAAAGCTTACTTCTTGGGCAAGTCACAGTGATGGCTAGTGGCCTCTCTGGATCTCTCTTCTTATGT
GCACAATTGGACTAAAATGCGTTGCCCTGAACACCATACAGGTACATTTGAAGGGTGCATATCATTATGTCTGTGACAGTTCCCAAGGGCTAATGTA
GGATATACGTAATCATAGTCTAAGTGGGTGAGCACTTGCGATGCACATAATTTTGTTGTCAGAGCACTGCAGAAAGCAGGGTCACCGCCACTCTTGA
ACGTGGGAAAGTGAACTCACCACCCACGCCTTCACCCCTGTGAACTCTAGACACCTCCTCTCGTCCATGTATCATGAAGTGGTTGTCAGGGCTCACA
GTGGGCGTTAGTCCATGCACCTGGAATCAAAGCATCAGAGGTTTTGTCTTCGTTTTAAATCAGAGGCAATGCATTAAAACAACAAAGTTTTTTTCTT
TCCTGTTTTATTTTTTAATGTTTTATAAAATAATTTTTCCCAAAGATAGAATTTTACTTAAAAACAAAACAAAACAAAACAAAAACAAATGTAGTTC
TCATTTTAAAAGAGTGAGGTCATCAGAAAATACATTTATCCAAAACAAGGTCTCCGTCTCTTGGAAGAGAGAGTACTGGGAATTGAACCCAGTGCCT
TCCACACACAAGACAAGCATTCTACTGCCACGGTACACCCTAGGCTGAATAATGTCTTTCTGAGTATCTAACACTGACTGGCTCTATAAACCACTTG
TTCTTACTTGTGAATGTATAATTTTAAAAGGTCAATTCTCAAAATACTGAGCTGCAGTCTAGCTTTTCTTACCGTCTTTTTATGGGAAGTATGAATG
AAAAGTTTGCCCCATTCAGACCTCGATCACTGCTCAGTGGCTCCTTAGCCCAATAACATTAGTAATCTCCTCGGGGAGTATGGAGCTCTGCCTTTGG
GACGGATGCTCAATTCACTAATTTCCTGTGACATTTTTCAAACAACAGTCCGCCATCTCACTGTGACATGTATCGATTTTCTTAAGTGTCAGTGCGA
AAGAGGATGGGAAATTGCCTACTGGCAAAATTGTCCCCATTCTTTCAAGTCTGACTGTGATTTAAGAAGTTCTTAGTGGTCAGCTAGAAGGGCCCAC
CTGGCCATTCCTTCCTCTCCACCAGCAACAATGGGAGCATGTGATTCACAAGGGAATCACATTCAACTAAAAAGAGAAACCGGGGTATGCTGTTTGC
AAGGAACGGTTGAAACTGGAACTCAATATGTCGTGTGGTGTGAAATAAATGTGTGTCTCACATGTTTTCCCATGCTGGGGGCAGGGGTAAGAAAGTA
AAAGGCAGACTGGTTAAAGACATGGGGTGGGGAGGGCTGGAGGGACGAGTGGTAAGAAATGGCGACAGAGGAGATGAAGGTAATGTCATAATGAAAC
CCATCACTGCTGTGTGCAACTAATAGATGCTAATAAAATAGGAAGTTTTAATGATTTAGGTAGCTTATTGCTTGCATTCACCTCACTGTTAAACTAT
CACTTCTGGGGGATCCACACAACGAGCGAGCGAGTAAACCAGAAGATGGCGTTGAAGATTAGTAATCATATCTTTTAAACAAGATAACCATGTGAAG
TCTCAAAAGGTTTCTTGTAATGACTGTTGTTTAAACTTCTGAAAACAGAGGATGTAGATTGGCTGAGGAAAATGTTGAAACCGCCTAAGTCAAGGTA
GAAGACACGTGTGTCTAAGTGAAAAAAAGAAAAAAGAAAAAAAAAAAAAACCAAAAACCTCGGGTTGGCTGCTTCTGTCCTTAGTCTGTGCACGCTT
TGAAGAAATGTAATTCCTCAGCAGCAAGGCTGTGCTATCTGAAGCTACAATCTCTGCTTTGCTCCGAGGTGTGTCTCTGGTGACCGGGATAGTTCCC
GACAGACAGAAGGTGTTCAAAGAATATTTTTGAATGAATGAAACCCCAAAGGAAGAAGAGGGGAAAATGGGTGTGACCAAAATTTTCTTTGAACGAA
ACTCTGTTGTTTACTACCAGGGCTCTGACAATGGAAAACTAATTGGGGTGAAAGAACGACATGGCATCCTGTTAATTTCTGAGAAAGCCTGTTGATG
TTAGGAAAAAAAAACATGCCGGTGGGCATCTCTGCACCAGTTTTCCTGTGGCCAAAATCAGATGTTTCTCCTAAAGTCCAGAACCCAGGATGGAAGA
TTAAAAGAAAAACTGAGAAACATGTGAAATGAAAAAGTTGTCAAATCTTTACAAACGCTCCAAGTTGACCTGTGGTGGTGGTAATCTAAAATGATAC
AGAAACTGGTAGTCTGCTTGCTTACCTGAAAACACCAAGATAACATATAAGCTCCAGGCATCCAAGCTGAGCTGGAGAAAGTCAGCGGCAAAAGCTC
ATGGAGTTTACATATGAAGGTCAAAGAAAACACGAAAATAAAGTAAAACCTTCAGTCAGCCTAGCTGTTCTATTTGGGGCATTGGTACCTCACCGGC
AACTGCCTCCCACGAGGCTGAGGTTAAAATTATCATTTTAAGGTGAATTGACATCCGGAAGCGCGCTAACTACCTGAGTACTCAGGGATCCCCCATC
TCTTTTATGTTGCCATGATTGAAACTTTGGGGACTGTGCTTGTCTGAGTCATCTCAATTCGTCGGTTTCATTCACCCAACATGTATAAGCGTTTCAA
ACACAGTATTTGGGCCACGGCTTATAAACTTGCCTTTCTATTTTTCTTTTTAGTGAGCGTGATATTCTCTAAACGCTCAGAGAGACAAGACTCCGCT
TTGCCCAAGGATGCTCCCGACCTCTCTCAGTCTATCTCTTCTGTCACATGCTGTGAGAACCAAGTTCCCTGTGCTCCAGACTCTCCATCACTTCCCA
ACCTGGCCATGAGCAGTTAGTAGTTATCAGCTATGCTCAGTGCAGATTCCAGTATCCCCTTTGCATGCCTCCACCTTCACAGGAACGGGCCATACCG
ACTTGTCCCATCCGGTTGAGGATTTCTGAGTACATCAGAGTCCCCAGCCCCCTCCACAGGAGGAGCTGAAGAAAGCCAGGGTTTGTCTGAAGTGGGA
CAGCCCTTGACCCGGTGGGCTCTAGTCCGAAGCTCCTGTTCCTGCGGGACACCCAGGCACAAGGCAGAGGTGGGGGGCGGTCCTGGGTATGGGCAAG
CCACGCCCTCTCAAGGCGGGGCCGAAGCGCCCGCCCTGCACTCCGCCTCCGGCTCTATAAAGTTCCTCTTTCTCACCTCACTTTCCTAGTTTCACCA
CTTGAACTTGGGACCCTTTGCTGCCCTCAGCTAAGAGTGCGGGTGAGGTAAGGCCTGTAGTCGGGCAGAAGGAGGAGTGTGAGGCTGGTGGCAGAGG
AAGCCTGGCTTCCATCTCTGAGCCTGAGGGAGAATGCTGAGATAGCGGACCCAGGCTCCGCTCATCTACGCTGCCCTAGGACCTGTGCACTTCGGGT
TTTGTATGAAGCTGTTTGGGTGGGAGTTCCAGAACATCCCCCACGGGCTGGGCGGGACGAGCTAATGGGACTGTGGTGTCATCAAAGGATCGCACTG
GCCACAGCTTGTCCTCAGAGGGACAGCCTCTGACTCTCTCTGCTCCAGTGGAAAGCTCCTTTCCAGCCCTGGTTCCTAAAGGACCCAAACTCATCTA
GGGCTCCAGAGCGTGATTCCTAGGCCGGGCAGCCAAGAAGAGCTGAGAGCTCCAAACTTAGGGTGCTCAGAGCCCCTTTCCCCGCATGCCCCTTCTT
CACTTCTCTGGCAAGAGTGCTAGTGTTGCTGTCCGCAGCACCCCTTATTCCCAGCCTCGGCTTCATTCCTGCCAGGGTTCACGCTGACATTCTGCAG
GTTGGAATCTCCTGTTTCTTGGCTGCGCTGCTTGCCCCATAACCAGACTTCCACTTGTTGCTTCCAGGACCCACGTGATGGTCTCTGGTTGGGTAGG
CCTGGGGTTATTCCGAGGACAAAGTAAGGGTGTCATAGAAGAAAGTCAAGAGAGTAAGCTAGGTACCGCAAACCTGCATGGCAGGGACACAGGACCT
GGACAAGGGCTAGTCCATGTCCCAGGTCCTTTTCGCCTGGGGCAGCCAGGGCAACCTAAACCCAGGAAGGGGCAAGTGTAGAAACAGTGAGGGAAAA
GTGGGATGAAAGCTACTTGGATCCAGCACAGAGGGACGAGTGAGCAAAGTGAGCGCCCCAGCGTGGCGCAAGACTTGGGATCTGCAGAGAAGCTGTG
TAGCTAGGAGCTTTCAACGGAGCGTGTTAATGTAAATGTAAATGAAGAAATTACCTAATTTTTTTAATAAAAGAAAGAACAGACAGGCAAAAAAAAA
AGGAGGAGGAGGAGGAGGAGGAGGAGGATGGTGCGCGCCAAGGGATGCTCTCTATACCTTCGTCAAAGTACCTTCTCTTGGGGGACTTCGGAAGACT
CTGGCACTGCACCCGAGCACCTTGGCAGCCTCAGAGACTCGGGGCCTCGTGGGCACTGCAAGAGTTTGGGACGGGGCTTCCTCCCGCCTCCAAAGTG
ATGCGAAGGTAGTTGCAGGGAATGTGTGTCTCTCCTCAGCGCACAAGCCCAGGAGGAGGTCCGCACGCGTCATGAACTTGGAGACGGGCAGCCGGGG
CTCAGAGTTCGGCATGAGCGCAGTGAGCTGCGGCAATGGGAAACTCCGACAGTGGTTGATCGACCAGATCGACAGCGGCAAGTACCCCGGGCTGGTG
TGGGAGAACGAGGAGAAGAGCGTCTTCCGCATCCCGTGGAAACACGCGGGCAAGCAGGACTACAATCGTGAGGAGGACGCTGCCCTCTTCAAGGTTA
GCAGCATTCAGGGATCCCTGGGCAGGGGTGGGGGTGGGGATGGGGAATCTGAAAGCTCTGAATGTCTGTGGCTCCCGGGCAAGGGACTAAGAGGTGG
GCTCCTGCAAGGAGGAGGCCAGAGCATCAAGCATTGGACCCTGCTTAGGCAAAGTCCCCAGGAGAAGGGAAAGAGGTTGCAAACTCTCCGGGGATTG
CATACACAAGAAACCAGGTCCCAATACTGTTTGTGTGGAGGAAAGAACTTCCAGCTTCAGGGGCATCTCTGGGGGACCGAGGTTCCGTTTGCATAGC
CCATTCGCTGTTTCCTGCCACCACCACCGACTGCTAGGGCCACTCTCTGCTTCCCTGTCTCTCTGTGTTTTGTTATTTTTCTGAGTTTCTCTCTCTG
GGTTTTGTTTCTTTGATTGGGCACCTCTACTGTCTGGTTCTAGTTCTAGAAGCTGCGATCTCTGATTTTCTTTCTTTGAGTAGCTTTGACTATTCCG
AGTCTTTCTCTGGTATCCCCCTCCGACCCCGTGTGAGTCCCTTAGGACTGATGTCCCCAGAGAACTGGCTCACTGAACTGTGAAGCCCCCAGCCTCC
ACCTGCCAGCAGGCCGAGGAAGGGGACTTCCTGCGGGAATTTGTTCAAAGTACCTCTGTGATTTTGTAGATGTCCTCTCTGGGGCCTGCCCCCTCCA
CAGCTCTGTCCCCAGTCTTGCCCACACTTGATTCAGGCGCTGGGCGTGTACAGCCCATACTAGGGGTCTCAGGACCCCACTAACATCATGTTCCACA
TTTCAGGCAACAGCAAATTTGAAACAGTAACCTTCCTTGCTGAAATGCAATCCATAGAATTCTTTTGACGCTCTGGGCTTGACTTTTCTTCTCATCG
TTCTTAGGCTTGGGCATTGTTTAAAGGCAAGTTCCGAGAAGGGATCGACAAGCCAGATCCTCCTACTTGGAAGACAAGATTACGATGTGCTCTGAAC
AAGAGCAATGACTTTGAGGAATTGGTCGAGAGGAGCCAGCTGGATATCTCTGACCCATACAAGGTGTACAGGATTGTTCCAGAGGGAGCCAAAAAAG
GTAAGGGGTTTTCCCAGCCCAGGTGGCAGGATAAAGGCATTATGGCACTCAGAGAGCCCTTCTTCCTAGAGACAGTCACGTCCTACCTCTGCTGTAG
GTTAAGCCCAGATGTCCTTTTGCCCATGTCCTCTCTGTTATAAGTGACAACCCTGTGGTGTTAGTATAGGATGACCTGGCAGACTTTAAGCCCCATG
GGTGTGTGGGTTATGCACTTGAAGGCATTATTTTCAGTTACTCCATTCAATTAGGATCTGGATCAAATTTCCAAACAAAATCTGGAAAATCCATTAA
ATGTTTACTTACCTAATATCCTCTAGTAAGCATTTTCAAGAGGAGAAAGCACATCCCACACCCCATACATATTCACACTTCTTGTAATAAAACTGCT
AGAGTTTCTGGTTTAACATGGCCTGCTAGGGTGGTTATGAATATTCAGATCTTGAGTTCCCTCTCTTCCAACTAGTCTACCTCAAGCAGTGCTCAGG
AATCTGCATTTGGTTCCAACCATACAGGATGCCTTAACTAGGTACCATCTCACAACCAGAAACCACTTGGTGGATCACAGGGATCCTGGGTGGTGTT
TCCTTCCCTGGCTGTCACTCACAAGTCAGCAAATGTTTAATCAGTTTAATGGCAAAGACAAATATCTCTCTAAGAAATTGCTTGAAAAACAAACAAA
CAAACAAAACAAAACAAACCTAAAATACCCGATTGGTTAATAGGGCTATGCATTCTAAGAATTAAGTGCATAGGTACTTTTATAAGATTTAAGTCAG
TTCCTTGTCTTACTCTGTGTTCTCTCTTCCTTTTCCCCAAACACACAGGAGCAAAGCAGCTCACTTTGGATGACACACAGATGGCCATGGGCCACCC
CTACCCCATGACAGCACCTTATGGCTCTCTGCCAGCCCAGGTATGTGGTAGACTCTTGGTCTTGTGGAAGGCTGGCCCATGCCCTTTTGACTGGCTC
CACACAGAGAGGCAAACACAAATGAAAAGTGTAGGGCTGACTTCTTATTTGCTATGGCTAGTACACACGCTGAACAAAAACTTGGTCAGAGAAGGAT
GTTTCAGTTCCAGTGTGGTGTCACTGTCCCTGACGCCACAGTTTTGTTGGGGAGTTTGATGTGTCCCACCTGTGGAGAGAGGCTTCCACTGATGGTC
AGATCTTCTGGGAATCAGACCTTTTGTGGAAGTCAAAGGTTTTGGAAGTAGTACTTTATCATGTGAAACCGCAGAGCAGCTGACTTCTCTAGGCGTC
CCTGATGTGAATTACAGTACTGTTTTATTCACTTTGGTGGCTTAATTAGGGCAGATTTCACTGCGGTATTCTTGGTGCCGTGTTCAGCCATATGATG
AAGCCTTACAAAAATCACAGCTTTATACAATGTCCTCATTGTGCTTTCAGACCCTCTATGGCTGTTTTTTACCTAGTGTGATAGACAGTCCATGTCA
CTTTTTGGGCAAAATGACTTGGCTGCTGGACAAAAAAAGGGGTTCCCTGAGGAGTTTGGGTGATATGAAATGACTCCGACACCCACTGATGTCTTCC
TCTTAGCAATCCCTGTGCTCTGTCAGCAGGTTCATAACTACATGATGCCACCCCATGACAGGAGCTGGAGGGATTATGCCCCTGACCAGTCACACCC
AGAAATCCCATATCAATGTCCTGTGACGTTTGGCCCACGAGGCCACCACTGGCAAGGCCCATCTTGTGAAAATGGTAAGGATTGTGCCAGGGCAGCA
GACAGAAGAACAACCTGAGCTCGGGGTGTGGACAGCACCACAGGGCTTTTCCCTACCATTGAGATACCAGAGACACATCATATGAAGCTGCTACTGT
TGTTGTTGTTGTTGTTGCTGCTGCTGGTGCTGGGGTGGTGGGGTGGTGGGGTGGTGGGGTGGTGGAGTGGTGGTGGTGGTGGTGGTTGTGGGGTGTT
GGGGTATGTTGCCTTGTCCTGTGAAATGTTGAAGTCCTTAGATCCATGATAGGCCTCAGTCTGTGTGGGGACTTAACTAGAAGACCCCAGAGATCAT
TCCAAGTAGCTGAAAAGTGCCCCATTTTTAATACATAGAGAAAAACATGGATGACAACAAATTCTCAATGACAGTAATGTCAATTATAAAACTCGTC
TATATTTTGTTTTAACTGAGTTATCCCTTATTTCCGATGGTGATTAAGTTGGGGGGTTTGTTGTATCCCACCTATCTCCCTAGTCTGTATCTTTCTA
CTCTCCTGTAAAGTAGAGAGTTGTACCCAGTCCACCTCAGCAGGAAATCATTGCTAGTTCATGTCTCTTGAATAATAATGAGTCATCTATAGCTGTT
CTTGGTACTAAGGAAGGAAGGATCAGAGCGAAAGTAATCCACAAAGTGTCTCTACAAATGAGTGCCCTGCCCGAAAGACCCACAGGGGTCCCCCCAT
GCTAGCTGGGCTCTCACAGAAGAAACGCCCACTAACCAGACACAAAAAAATTTCACAAACTATGTTCAGTGAGACTTGGGTCCTTTAGTGTTTATTT
AGGTGAGTGCACCAAGCTCCACCTCGGGTCCTTTTTTGGCTGTGTATTTTAAGGTAGAGTCTTGCTAAATTACCAAGGCTAGGATCTTCCTGCCTTC
AACTCTTGAGTAGCTGGGACTACAATCTTGTTCTAACGGGCTGAACATAAAACAAGTTTTTAGGACTTACAAGTTCACTGTTTAAATATAAGTCTTG
ACATGGGTCGCCGTGCGAGTAGTTCTTTTATATTGTTCTGGCAATACTTTCCTTGTGACAATTTCATCAACACCCTCACTCAGTCTGTGCATGCTTA
GGTTGAATAATTAATTCATCTTTGAACTAGTCTTATAGAAGTTTGAACTCTGACCCTGCTGGTAACTTGCTATGTGGGCTGGTGCAAGTCCCTCTCC
TTCTGGGCCTCAGTTTCCCTATAGATTTGGAGTGAGCCCCAGGTTTCCATCCAGAGCTGTACTGTGGCTCCTTCCTTCATCACCCTAATTTTTATCA
CTGGATGTGGACTTTGGACTTTGTCCCATAATCACACGTTATGCTGCTAGCAGGTGCTTAGAGGCTGTCAGGCTTGGGTTGGAGGCCATGGCCTCTC
CCAACTCAAGAGCCTCCCCGCACTCAGACTCGATACTTAGACATCATCTGATTTTTATTTGCAAATGCAGGTTGCCAGGTGACAGGAACCTTTTATG
CTTGTGCCCCACCTGAGTCCCAGGCTCCTGGAATCCCCATTGAGCCAAGCATAAGGTCTGCTGAAGCCTTGGCGCTCTCAGGTGAGTGTGGCGCTTC
CTGTAAAGCTCCGAGGGAGGGGGCATCTCTCCTCTACTGAGGTTGGGTGAGGATTTAGACTCTCGCCTTGCAGGCCCCGGGGTCTGGAGTAGGCATG
GTCCAGGCTATGTGGACATCACGCTGAGTCAAATACACTATTAGAAATCTCCACAGCAGTACCAGCTAGCCAAATACTATTTGGACGATGTCTTTAA
CCTTCTACATCATTACCTGCCCAGTTTTCCAGGAATGTGTAACCAGGCTCCTCCTCCAGCCGACATTCTCCATTCTCGCAGTGTGGAAAGGCTTTAT
AGGCACAAAAGAATGCTGTTTGTCCTTTTAGGGTGTAGGGTTGGCCACAAACAGGTGGTCTGAGTTGCTTCCAAGGAACACTGGTTCTGAACCCTGG
TCTCTGAGAAGTTCTTATGCCCCCTAAAGGATCATATAGGTCTGACTCCCTCACAACTTTGACAGAATTGCTGAGCATGTGTGGATGTGATCTGATT
TTAAAGTTCTGTTACTAAGGAAGCCTGCACTTGGAGATACTGACCAGCATTTTAAAAGCCCACACTCCGTGGAAGCAGACATCTTATGTCCATTTAG
TCTTTAGATGATTTTTTTGGATGTTTTCAAATGGAATTATTAGAATTCTCATCATGCCCTCGGCTACCTTAAAAGCCTCTGACTGAAAACATCAACT
GCATTTTGACAATTTTAGACACTTCCCTTGTTCTCGAGGGAGGAAGAAGTTTTAAAATCTAGTTCCTTCCAGCTCTGATGCTCAGGGAGACTTTGTG
AGCCACTCAAGAACAGCCGAGGAGCACATCTGGGCATCAGGGTTTGTCACAGACACTAGAATGCTCTAGATCCTCTTCTGGAGCGCCAAAGACTTGT
GTGGGTGCCCCAAGAGTAGGAAATAAACAGCTATTTATATCTCTGCAATCTTGTGATTTTGGTGACATTAAATGAAATGAAACCTGCCCTACCACTC
ACCTCAGATGGCCAACGCCCCCTCTCTTTGGGTGCACCACTTGTGCTGTTCATAGCTGCAGCTATCGAAGACACCATGATGTGGGCTGTCAGAACTT
GCCATTGAAGAATACGAGGCTTTTGTGGGTTTCTTCTTCTAGTTTGCATAATTAATTATCAACCCTGAGTGCACTTTTCAGAAAGCTATTCTTTCCA
GGCATTGTTGGGGCTCCAACCACCAGCACGGGTATCTATCTCTGCCTGGGGAGCCCTTTGCACACCCAGCTTGCCCTTTCGGCCCGTGGGTGGTATT
TTAAAGTGGCTTCTGAAATCAACAAAATCATGTGTCAATAAATTCCTGTCTTAAAGCTGTAGAAAACCTAGTTGTTGGGTTCTTTTCAGAGTTGAAC
ACGAAGCTTAGAGGGATTTCAGGGGGTTTTACATTAACCACTGGCTTTTAGAGCAGTTCTCATCAATTTCTTCCCCTACTCCAAGAGAGCTGACTTA
AAAATAAGAAAATAAAGGTATCATTTTCCAGAGCCCAGAAATTGTTATTTTAGTGCCTGTCTCTAACATATCTATGTGGGTTTTGTTGTTGTTTGGT
TTTACTTAATGACATCATGGTAACACCTTAGGGAAGTTCCAGAGCTGAGGACACTATTTGCTTTTCTTCTAAGATGTTTCTGTATTTCTTTTACTAA
TAGAAATCTGTCCCAGAGGTCAACTCCAAAATCAAAATTGAGTTGCTGGAAAACGAATTCCAATTCGGTAGTATTATTTCATATTGTAGACAAAATG
CCACCACTGTTAACACCATCATCCGAAAAGCCCTCATAACAGGGGTGTGCTTTCTAATATTATTTGGCTGAAAATTCAAGAAATATATACCTCTCCC
CAAGAGAAGTAAATGGCCACAACAACATTTGAAAATGATCGTGTTAGAGAGATCAGTTTCTTTCCACAAGCTTCTCTTAGTATTCTGTGCTTGAGGT
CTAAGAATCTACAGGGAATAAGAGCAGCTAACATCTCCAAGACTTCCTTGGTCCTAGGATCTTTCACTTGTTCGTGGAGCATCTTGACACTCAAGTG
TTCCACCTGCTGTCCTTCGTATCAGTCTAGTCACCGAGTTTTTGGGGCTCTGAGCAAGGTGGCACCTTTTTCAAATCCATCAGCACTGACTCCAGAG
TTTTGTTCACAGACTGCCGGCTGCATATCTGCCTGTATTACCGGGACATCCTCGTGAAAGAGCTGACCACGACGAGCCCTGAAGGCTGCCGGATCTC
CCACGGACACACCTATGATGTTAGCAACCTGGACCAGGTCCTGTTTCCCTACCCGGACGACAATGGACAGAGGAAGAACATTGAGAAGTTGCTGAGC
CACCTGGAGAGGGGACTGGTCCTCTGGATGGCTCCAGATGGGCTTTATGCCAAAAGACTCTGCCAGAGTAGGATCTACTGGGATGGGCCCCTGGCAC
TGTGCAGCGATCGGCCCAACAAGCTAGAAAGAGACCAGACTTGCAAGCTCTTTGACACACAGCAGTTTCTATCAGGTAACACACCTCACAGTCTGTT
AGAATGGAGGTGGTGGTGGGTGCTGGCTATAAAGGTCTCAAATGGCAGTGTCTGCCTACCCCAGACAGAGGTCTTCCTCCTGAGATCTGTGAGCTCA
TGCAGAAATAGAATTCCTGCCTGATTCATGCCTAGCCTTTGTCTGTTGTGTACTCCCCTGATTAGCAGAGGGCCAGAAAGAGGATCCATATTTGCTG
GCCAGGATAGACACTGGTGTGGGTTGATCTCTTAATTTATCATCATTCTTTTCACTCTAGGCTTTTGTTTTGTTTGTTTTGTCAGAATATATGTAGC
TCAGGCTGGCCTAGAACTCCTGCCTCGGGATTTTATCTGTACACCAGCACATCTGGCCAATGAATTAAAATGTGGGCTTTCAGCGGCATGTGCCCCA
CCCCCAGAGAGGTTTCACTGTGTTGGCTCTCTGCTCTCAGCAAGTTTATCTGCTGACACCTCAGCTCTTTAGGGGTTTCTAGAAAAATCAAGAAGGT
TAGAAACACCATCTTAACATTTTTGGTTATGAGATGTGTCACCCTTATAAAATTGTCACACTTGCGAGGCAGGACCAAAGCTGAGAATGTAAGGAGC
AGATTCAGCGAGGGGGAAATTCGGAGAAGAATTTGGTCTTATCTCTGGCATACGAAGGCTTCTAATCATATTTTCCAGAACCTGTACTTCTTATGGT
ATGATTTTTGACTTTGGGTAGTTACGTTAGACCAGGGCTGGCTTATATGAAGTCATTAGTCTTGCCACTGGTGGGTACCACCCAGAGGCCTCCCCTA
GAAACGTAGCCGAGGATGCCTTTAAGGAAGCAGGCTGCTCTGCTGACTGCTAATTGTCATTCCCTCACCCCATCATATCCTAAGCTTGCTTTCTTCC
CAATGCCCTTCCCAAGCAGCTCACAGCTCTGGCTTTCCTGTGCTTTCCTTTTCTTGAACCGGGACTTGCCTTGCTCCTTCTCATCCATGCACACTGT
GATGCTTTAAAATGCGTGCACACTAGGATCTGGCTAAATCCACTAATTAGCATGCATATCACCTTGCCTGTCTATCTTTTTTTAATTTGGTAAGAAC
ATTACTTGAAATCTACTCTCGATATTTTTTTAAGCACATGGTCCATTCATTATTAGTCATGAGGATTGGTCCTTGAGCTTGTGTTCAGCAAACTCCT
CATGTCTTAGTGACAGTTTATATTCTTTGACCCACAGCTTCCTAGCCACTTCCCACGTGTGGTGACCGCCATTTGGCGCTACTTTTATGAGCTCAAC
TATTTTGGAGTTCGCAATGCAATGGAGCGTCACGGTCTTTGTCTTTGTGTGCATGGGTAATTTCACTTGGCATGATGTTCTCCAGGCTCATTTGTGT
CATTACTAATGACAGGCCTTCCTTCTTTATAAAGGCTAGGGATATTCCACTGGGGTATCTGTATCGTGTCACTTTCTCTTTATCTGTGTATCACTGT
GGGTACTTGGGATGATGCCTTGTCTAAGCAGGTCTGACGGGTAACGCTGAGTGGGGGAGTATAGCTGTCTCTCCAAAACCAATTTGCTCTGCCTTGG
TTACGTTAGACCAGGGCTGGCTTCTATGAAGTCATTAGCCTTGGGTCTGCACACAGAAGGGGACTGCTGAGTCCTCAATGTGCTGCTTCCTTCTGTT
CATTTACAAAGAAGACGACAAGCCCTAGTGTGCTTGGTACTAGTGGTGTTTCCTCAGCCTTTTGAGCTCCAGTGGCCAATATTTGTTTAGGCTCATC
CAAATCCTCTTTCGTTTCCAAAAACAAACATGCTCCTTGCTAAATATCCTCCCCTGAGAGGTGGGACACAGAAAAGAGAATCATCTCAGGCTCCAAG
GTGTCTCAGGCTCCAAGGCGTCTCTGGCTCCAAGGACTGATGAAGATCCTTGGAGCTGGGTGTGATCTAAGCCTTGGTCAGACAGCCTTTGCCTCTC
TTAGAGTGAGTTCTAGTGTTTGTGGTCCAAGGCAAAGAAAAATAACTTCTGGAGATGGATAGGTACACACATCCTATATCTGCCCTGGGGTCTGGAA
GTCCTATGTGCCCTCCAGAAGGCTACCACTCACTCCCTGCTTGATTAAGGTAGCTCAGAATAGTGACAATTGCCAGCGACAGGGCTTTGAGGTACAC
TAAGTCTTGGTGTGCCAAAGAGGATCCAATTTGGCAGGAAACAAATGCCAAAACAGAGCAGACACCTTGGACTAGAAATTTGCTTCCTAGGACTTAT
TAGTTATTAATGAGTAAGGGCTATTTCCCTTTGTTCCCTTCTTCTCTAGTGGGGCCTGTTGTTTTTGCTGTCCACAGTCCCCAAGCCCCACAGAGGC
TCAGGGAAGATGACATTGCTGCAGAGAGGCCCAACAGCCTCAGAACCTAAGGATGCCCACCCAATGGTCCGGGAAGAGCAGGCTGAGGTGGGCTTTC
TCAGAGAGTCGCATCCCTTGCTATTCTGACCTAGCCCCTCGTAGGTGTCTTCCCGGCCACAGTGCTATGCACTTTATACAGTGTGCCTAAACCCCTG
GGTTTGATTTAAATTCTGGAAGAAGAAAGAGAAAGAAATGCAGGAAGTCAGTTCTGTGAGCTTCTAGAAGCAGTTCGGTTGCAGAGAGCAGTGGAAA
TCTTTGATGTCTACCCATTCTGGATTTGCACCCCACTAGGGACAGTCCCCATAGGCACAGTTGAGAATTCATATCTGATCAGGGCAGAGTCTTCATG
CCTGCTCTGTGGAGGCAGCTTTTTAATGTCAGTTCTTTGATGCAGACAAGACCTGGGAACCTAGCTCTGGGAGGAGGAATAAAGGTTAATGCCAGTG
AGTGGATGTGGCTTTCTGCTTGTGCTGGGGGAGGAAGCCAAGGCCTTGCACATACAAGGCAAGTGCTCTGCTCCAAGTGGCGATGCCCCCAGCCATG
GGCAGGTTTCTTTTCAGCAATCTTGTCTGTTTCATGTCTCTCAGGCAGGACTAGCCTCAGCATGACATCCTTGTCAGAGGGGCTTCATTGGTCCCCT
TCTCCCTGTATCATCCTGTCCCCAAAGTGAGATTGAAGCCTACTCTGGTTCTCCAGTTTTGGAGTTTTAGACCTAGTGCCAAGTAGGACACAGCTGC
CAACAGCTGGTGAGAGAAACAGATGCTCTTGGTGCCCAGACACCACGTGGCCTCCATGGTTAGCTAGTGAGGTTAAAAAAATAACCCTGGGCCATCA
GAACATTGTGACTCTTTACATTAAAATGTCTCCTTGGCCTGTGCTGATTGCTTGACTCAGCATGGCTACTTTTCTTTTTCTTCTTTGTCTTCTTCTC
TTTGACCTTGTGCATTTCTGTGAGTGTAGTGCTGCAGACCCAAGTTCTTAAGGTTGGGTCATGTTCCTTAAGAGTAATGAAGTAAAACCAGTGCCAA
GTCAGGAGATCATATGTGAACTTGACCATGTGATTTTGTGTCTAGGGTCTGCTCTAAGGGCTGGACTTAGGGGAACAGAGCCCGGGCTCTCCCAAAG
CAGACTTCCACGTGACTCTGGCTTTCCGTTCACCCGCTTTACCAGGTGTCTGAACAGTTTGGTTTTTTTTTTTCTTTCTTTCTTGTGGGTTTTCAGA
GCTGCAAGTGTTTGCTCACCATGGCCGGCCAGCACCGAGATTCCAGGTGACTCTGTGCTTTGGTGAGGAGTTTCCAGACCCTCAGAGACAGAGGAAG
CTCATCACAGCTCATGTGAGTACCTGGTTACATCACCCGTAAATCACACACTGTGGAGCTGTCCCTTTTAGAGAAGTGGCAAGTGACGAGTAAATGT
CAGCTCACCTGGGAAAATAGATGTAGACCTTAAAATAGTGCAGGAGGAAGCAGGCTCCAGTGAACACCACAGCTCAGGGAGGCACCCGCAACCTACT
TCCAGACAAATTCTGTCACCACCGAATCAGCAGGGCAGATGACTTGGACCCAAGGCTCTGTTTGTTCTGTATTCTTTATTGTTTCATACAGACAGTT
ACCTGCCCTTTTATAGGAATTTTCAATAGTTGGGACCAAGTACTGCCCTTCGACATCTCTGTTTCTTGTGTGGTTTTAAAGATGCTGTCCTTTCGAG
TAGAGTAGCACTTTCTCCCTGGGAGGCTGCCTGTTATGTATTATGCTTCATCGTGCCTCCTAACTTCAGATAGTTCCCAGACCCTCGTTTTGTTGCT
GGACTTTAGGGAGTTATTTAACAGTTGGACAAGGGAGGTGGAGGAGGCTGAGTCTTCCCAGGAATCAGGTAGGTCGGTCTATCCTCACAGCTAGGGT
TTATTCGGATAATGTTCATCACTCACTTAATAATTAAAAGGTAATTCTGAATACATGATGTTTTTTAATTAGAAAATTTTACTTAATTACATATCTT
GAAAAGTATGCAGTGTGGAGTAAAGGTTGTGTCCCAGATAGCCACAATATCTCAGTGCAAATGGGATATTAGCTCTGATGATATCTCTTAGTGGAGA
CTGAAGACTAGGCATACAGCGCAATGGAAGGCATTTGCTAGGCAGTGGTAAAGCCCTGGGTTCTAAACCCCGCCTAGGATGGGGGTTGGGCACTGAT
GTTGAACATCCAGCCTCCCTTCTCGGTTGCAAAAAGTAAAATCTAAGAAGCAACAAACGGGCTGGAGAGATGGCTCAGTTGTTAAGAGCACAGGCTG
TTCTTCCAGAGGTCCTGAGTTTAATTCCTAGAAACCACATGTGCCTTACAACCATCTGCAGTGAGCTCTAATGCCATCTTCTGGTGTGTTTGAAGAC
TGCTACAGTGAACTCACATACATATAAATCTTAAAAAAATAAAAGGCAATGAAACTATGATCCTGGCCTTGAGCCTTTTCTCAGTTCTAACTGGTGG
TTGATATCAAATGAGACTGCAGATGTGTGGATGAATCTAGCATAGATAAGCAGTATTTTTTTTTTTAAGGTAGTGAGTAAATTCTAGCATAGATCTC
ATTTTAAGGACTTTGGGTGCAGTGGGGCTCCGCAAAAAGGGAGCAACAATAGTCATATAGGCAAAGGGCCTCAAAATGCTGCCCCGTGGTCCACAGA
TGGAAAACATACATGGTCACCCATGAACTCTGCTGGTCTCCTTATTACAGACTTAATTCATATGGGTGCTTACAGAGGAATCCTACCAGACATCACA
TGCTTATAAACAAACTAGGTCCATCAGAGCCAGCGAGCTGCTGTCTTGTGGCTGGCCAGCTCTGTCTTCTACTTGTGGTTCAGAGTTCTGTCTATTT
CACAGTCATCTGGTTCTTCAGGATGAGCCCTTCTGTCAGACTCATGAGCCTCACTTACCCAGCATGTTACTTAGCCTTTTAATTTGGTCATCTCATT
CAATAATGTCCAGTTAACTCATTCGCTAAATATCAAATCCAAGAGGTGATTGGTTTCAAAATGCCATATTTATCTTCTATTATAGAATCAAGAGTTC
TTTTTCCAGGGTTTTTAATTCCAGGTATTATAAGAGCAAATGAAACTGGTTTTTCAAATGGCTCTGAATGTGAACTGCTTCACTGTGTTATGTTATC
CTGTGCAGCTTGTAGGTTTTTACTTAGAGTCCTAGGGTCATTTCATGATGTCCCAATTGTATGGTGTTGAGAAGAATATTCTAGTGATGTCTTTTTT
TCTTAAATGTCTTATTAAAGGTGGAACCTCTGCTAGCCAGACAACTGTATTACTTTGCTCAACAAAACACTGGACATTTCCTGAGGGGCTACGAGTT
ACCTGAACACGTTACCACTCCAGATTACCACCGCTCCCTCCGTCATTCTTCCATCCAAGAGTGAGAAGAAATACTCTGACAGGGCAGCCGGCTGCTG
CCCTTTCTCTTTGGAAGAGCTAAGAAGTGAGTGGGTTTCCACTTGAAGACAACAACAGGGCTTTGTGAGGAAAAACAGCTGTATCTGCTCAACAGAG
GAGCTTCCCCCAGAAGAGTGCCTGTCATCCAGGTCTTGACAAGTGCCAGGACTTGGGTGACTGTGCCCTGGCTTATAACTGTGAAACTTGATCAGTG
TTGTGTTTACATGTACTTGAATGGTGGCTTTAGCCTGGTATAGATGGACTTTTGCTTGAAGACTGAAAACCTGTGCCAGCATGAATCCCTGACAAGA
GAAGACATACGTATTATTGGTCCATTTCTCAGGGAAGTAAAGTCTAGACTAGAGACTACGCTGTCCACTCACAGAGAAACGCATTCCTGGATAGAGG
AGCTGTAGGTTGCCCAGATCATGTCCACTGAGTGAAGGGACTTGGTTCTTAGGTCCAGTCTAGGCTATCATGTCCTGATCCTGCACTCTCTCTGAGT
AGACCCTACATCCTGTTTGCTCCCTCTTCTTGCCCTTCCCTAAAAGCCAGCTGGTGGACTCTTGTTGCCACATACTTGAGCCAAAAAACCATCAGGG
ACATATAAGATGAGACATGTTTGCATCTCCTCTGATCTAACAACGGCTACAAAGTTTTTTGTTGTTGTTGTCTCCCCTTTCTGTTTTGCCTCTCATT
CTTTAGAATTGTTGCTTTTTTGTAAAGAAAGGAAGAGAGAGAGACCGAATATACTAGAGATAGATTTTTAAAATTCTGTGCCATTTCCCCTTCTATT
TGTTTTGTTGGCCATCAGTGGTCCCCATGGCAACACTGGAAGGGCGGAGCCTTTGAGCAGGTTGGGAACTGTCCCGGACACCAGTGGTTCAGTGTAC
AGCTGTAGACTCAGTGAGCTGTTTCTGCTTATTTTGTATATTAGATGCTTCCTTGTGCCAATAATAGTTTGACAGAGTCTCAAAGCTACCGGGCTTC
TTTTCCAACAACACATTCTTTCACAGAATCCCAAAGAGTCTCACTTGCCTTCACAACCGTCTGATCCTTTATTGTTACTGTTTTGTTTAGGTGGCTT
TGCCATGCTCTGGGATTTTTCTCCTACCACAACATCATTCCTGACTCTTTCGGGCTCAGAAAGAGTTAAGCGCTCTTGCACACTTGGCACTTACTTC
TTTTTAATTTTTTTTTTAACATGCCACTCTTAATATTTCTTCTTAAGTCTTTCAGCAGCATACATTCAATAAGCAATGGACCATTGGGTGTCTCATT
TCATTGTTTTATTTTTAAAAAGGAACCTTTGACAAATAATACACATTACAGAAAATGGAAGCATTTTTCATAGAGAAGGTAAGAACTGAAATGCATT
TTATGTTCGAATCCTCCTTGCTAGTATTAGCCCCAAGAGTTCAGTCTGTCCTTTAAGCATGTTTTAGTTTTCAATACATATATATGAAGTTGCCCTT
TCTTAGAGAGAGAGAGAGAGATATGTGATGACACTCTTATGTACCCAACTATACAGATTTACCTCATCTTTTGAGTGGCATGTGGACTTCCACTGCT
ATGTGCCTAGGTGCAGTTTAGACATCTTCTTAGCTACCCATCCCAGCAGCCCACTGAGTCTCGTGAACTAAAGTCACTTATACATCTTATAGATGCA
AAACATTCTGGGGTATATTATCCCAAGGGAAGATGAAGGCAAAATCGGGAAGCACTCTTCCTGAGGCCCCAAGCCACAGCTGTCCTCCTGGAGTATC
TTAACCATATCTGGCACTTCACCAAGGTCCCTTGCCTGGTCCTGTATGACCATGACTCTTCAGTCCATAAGCAGATGCTTTGTCTCAATTGCCATGT
GAAGTCTTTTGGTTTTTGGTTTTTTTCCTTAATGTTAAGCTGTTTTAACAGTGAAGCTGAATTTTCTGGAAAATGCTGTATGGTTCGAGCCCCCAGT
TCATGTTTCACTTTACAGCCATGCATGCTGATGCCTTCCATCTTGACAAATGGAATGATGGGTAAACACTCCTGACACAAAGAGGAACACCTTCCTC
GTCCCTTGCTGAAACAAAGTGCAATGCACACAGTAGAATTTAGTTTGCTTGCACTGGAAGATGCCGTTGAAGAGGTAGGCTGAGGAACACTGTATCC
TAGGGAGAAAATATGCAAGTCTCACGGGTGCTTTCTGTTGGCTTGTTTCTGGTCCTTGAGCAGGCTTAAGTATCTAGTTTCAAACTAGAAGCCCCAA
AGCCCTCAGTCGTTGTCCTGGACAGAGTTGGTAGACCCCACCTGTAGAAATCCAGATGCACTCTGGGATTGGAGCACAGAGAGGCTTGCTCTATCGT
GAGAATGCCCAGCCTGCAGAGGCCCAGGTGCGGTGCCTGAGTGGCTGTATGCCAGACACAGGAACGCCAGCAGGCTGAGTGTGGTGACTGATATGTG
AGGTGCCCTTGCCCTGCAGACAGGCTGAATGTGAGCCCCAGCAGCAGAGGATTCTGAGAGTCAGGGTGGTGTCATGTCCTACACAGGAAGAGCCTTC
AATATTACTTTTTAAACGAACTTTCCCCATTGCTGATATTTTGATAAAAACCCACACAAGGTTTAATTACATGCCCCCTCATCCCTCTCCACACAGT
CTTGCCCATCCCACTGGTGAATTGTTGTTGTTCTTGTTGTTGTTTTTTGTTATTGGTGAAAATTGTGAAATTGTTAAGGTCTCTGTTTTTGTTATTT
ATCTCCCTAAATCACATGGCTGCTGCATACATTGCAATGTTGCCCTACCACATGTATGTTTTTGCAAGTTGCTTCTTCACTCATTGAAGAAGCCTGC
ACCGTAAGTGAAACTCACTTAGTCCTTGCTAATTGCTGCTCACTGTCACGTGAACGCAGAGAAGGCTGATTTTCCTGGACCCATTTTCAGTGCTTTG
AGGAACATGAGTCCAGAGTATATTGAAGTAGAAGACAGTGTTTGGCAAGCCAGTTCTTATTAGACACTGCTACAGGCTTCACAATCTTCAAGGTGGA
CCCACCTCATGTGGAAGGGCATCATTGCCCCTCTGCTCCCATGCGCTGTGCACCCCCTTCACAGTGAAAGACCTGCTGGGGACCAGGACTCAGAGAT
CTCTGGCTTCGAGCTCATATCTTGGCTTCCTGTCATGTCTAAGCCCGACAGGAAAGTGTGGCACCATCCTGCCTGCGGCGTTGGATGGATAGGCCAT
GGATTTTGCTGTAAACTTGCTTCACAAGGAAAGCTGTGTGTTTTAAAATATTTGATAAATAAAGGATTTCTAGAAAGATTGACTGAGGAGCATATTT
AATACCATCCTCACAGCCCTTGAAACACTTCCTCTATCTGCTGGGTTCTTGGTGAGGCTGTCAGTGGCCTACTTCCTTCCTGGCTGCCTGTGAGTCC
CTGAAATCAGATCTCTAAAGTGTTCAGCAGAGAGAGAGAGAGAGAGAGAGAGAGAGAGAGAGAGAGAGAGAGAGAGGGAGGTTCTAACTCATGGCTC
TCACCATTCCTTCCAGCATACTTTTCTCAGATCACTATCCCCCACTGTTCTGGCTGTTTTGATCCTTAGTCCCAAAGGAGAGGAGGCAAAGCAAGAG
AAAGTATGAAATCGTTTCTCAGTGGCACAGAGATGCCACTGAAAGGTGAAGTGCTTAGAAAGAAAGGATGTTCTATCATCATGAGAGAGAGCTGGCC
AGGTGAGCAGGTGGGCAGAAGTCTTCCAGGGAAGAGCAGGGTACCTGTGTAGACATCNNNNNNNNNNNNNNNNNNNNCCTATGTTCTGAAAGGCCTG
GTAGACTTGGTGTTTTTTTTTTTTTCTGTTTGTTGTGTTTTTTTTTCATTTTTAGAAAAAAAATTTAATATCTAGTGTGTGAGTTTACCTACTTGTA
GGTACATGCACATGCAGTACTTGTAGGGCCAGGGAGGGGGGTCTGATCCCCTGTAACTGTAGGTACAGGTGGTTGTTAGCCACATACGCGAGAACCT
GGAACTCCAGTCCTCTGGAAGAGCAACAAGGACTATTATCCAAGTTGAGCCATCTCTCCAATTAGGGAAAATATTTTTTAACTTGTTTTAATGGTTT
GTTTTATACTTTGATTTCCTCTGAGTTTGTTGTCATGAGGGTAGCATATAGTGAGCCTGCACTCTGATAGGAGAGATTCCGGGGGAGAGGCACAGGG
TGTCGGTAGACTCTTGGGTATCCCTAGGAGAACCTTGGCTGAAATTCCTCTCTGAGAAGCCAAGTCAGAGAATGCCGTTCTCAGCTGTATCACACAC
ACTTCCTGACATGGCTGTGAACTTCCGTATCTTCCAGTGTCATAGGAAGACTGTCAGCCCAGGATAGGACTGTGGCCTGTGAAAAGCTCAGAGATTC
AGAGATCTGAGAAAAGCATTTAGCAAGGATCTAAACAACATATTGAATTTACTAAATAAAAACCAATTGCTCTACTATTCCTACTTTGGGAGCTCTG
TGTGTCCCATAAGTATAGATGGGCTCAGGCCAGCATGCACAGCCAGGATTTCTCCAGAAAGTTCTACTACTTGAACCTAAGCTTGTTTGAAGAGATT
TTGCTGACTTTTGAGTTCTTACATGATATTCCTATTCCCACAGGGCTTCTGGTCTTAGACTTTTCTTTCCAGTTACAACTTTGGTTGTTGGATTTGG
TTTTCTATAGTTGGTAGTATTAAGACAAATACAGGGTTTTTCACATGGGCAACACTCATCCATCCCAGAAACAAACAAACAAACAAACAAACAAAAA
CATGGCGTCTCCTACATGCCTTATTTCTGGGAAGGGACTGCAAGGTTGGTTGTAATATCTCATGTTTTCTAGCAGAAATGTCTTTTAATAAATGTCT
AGTTAGGAATTATAGGGCACCCAAGGATGTTTCTTCTACAGCCTAAGCCAGGGGCCAGAGGATGTCTACACAGGTACCCTGCTCTTCCCTGGAAGAC
TTCTGCCCACCTGCTCACCTGGCCAGCTCTCTCTCATGATGATAGAACATCCTTTCTTTCTAAGCACTTCACCTTTCAGTGGCATCTCTGTGCCACT
GAGAAACGATTTCATACTTTCTCTTGCTTTGCCTCCTCTCCTTTGGGACTAAGGATCAAAACAGCCAGAACAGTGGGGGATAGTGATCTGAGAAAAG
TATGCTGGAAGGAATGGTGAGAGCCATGAGTTAGAAAGAACCATAGCTGCAAGATGAGAGAACAACTCCATGGTTAACGGTGTGGATCAACACCTGA
AAATGATGGAGATGCTGAGATGGGTCTGATCAGAGCTGACTGTGGGCCAGAACTTACACACACACACACACACACACACACACACACACACGTGCGA
GAACCCCTCACACACACAGGATGGTGGGGCAGAGTTTAGGTACTAGAAGCTCCTTCAAGGGTGCATCTTCAATAATAATCTTCAATTATCTAACTTT
TCTCACACTAGACCCCACCTATCAAAGGTTGTACTTAAGGTTGTATCACCTCCCAGTAGTGCTCATCAGCCACAAAAGCTATTAACATTGGTATTTA
CTGTTTGTGTCTATGGCATATCACTGGTCATTCCTTTTTTATTTTTTTAACTTTTTATTGATTGTTTATGAATTTCACATCATGTACCTCAGTCCCA
CTCATCTCCCATCTCTTCATATCCACCCTCCACCCTTGTCACCTACCCGCCTCCGAAAAAAAATTTTTGGAAGCTGCAGTGTGTCACAGTGTGTCCC
ACAGTATACCCTTTTGTCCACACTTCCTTATATGCAAATGTTCATTGCAATGAGTCATTGGTCTGGTTCAAGGCCTCTGGCTTCTGTTACACTGTCA
ATACTGGATCCTCACCAGGGCTCTTCTCATATAGAATCTCCTCCTGTTGTCCTATGTCATGGAGATCTTGAAGCTTTGGGCCTGTAGTACCCTCTCC
TTCACATATACCAGCAGTTCATAGATGGCATAGAGCTAACTCAAAACCCTGGATCTGGGCCTGGGTGGTAGCTAAGTTGGTCAGCATGCCAGCTCTC
CTGCACCCACACCACCAGGGCAAGCTCTCCAGGAGTACCCTGGCTAACTCACCCAATGCCACAGGCATCTAGAGCCAGAGCAAGCTTTCCAGCTCTG
CCGTTGAAGCTCACCCACACCAACACCAGCAGAGCCAACTCTATTCTGCTGCTCAGGCAAGGGACAGGACTCACTTTCTTTAGTGTTATAGCTAGTG
AGGAGCAGGGCCAGCTCTCCTGTTCTCATGGCCTTGTGGCCAGCTTCCCCTTCTACCTTAGGTGGAGAGGGGTAAGGTGGAAGAGGAGGGCATCTCC
TTCTTGCTCATGCCACCCCACAGTAGACAAGTTGTGGGGCCAGCTCTCCCATGCTCATACCCACAGGGCTGGCTCACTTGCACCTCTGCTGCCAGGG
TTGACTGTACCGTGCTGCCCTGGTGAGGTGCAGGGCCCACTTTTCCAAGTCCTACAGCCAGTAATTGTCAGGGAACAATGGCCATTCTAAGAAACAC
ACATCACTGGCAAAGTCAACCACTGTGACATCAACAGGATACAACCTAGAGTCGTTAGATAGAGGAAACCTCAGTTAAGGAAACGCCTCCATGATAC
TGGCTTGAAAGCAAGTCTGTAGTGCATTTTCTTAATTAGTGATTGAAGTGGGGAGGGAGTTAAGGTCCTGGGGTCCTGGGTGCTATGGAAATCAGGC
TAATCAAGCCATGGAGAGAACAAGGCAGTAAGCAGCACTCCTCCACAGCCTCTGCTTCAGTTCCTGTCTCCAGGTTCCTGCCTTGAGTTCCTGCCCT
GACTTCCCTGGAAAATGAACTACAAGCTATAAGCTGATATAAAACCTGTCTTTCCCAAGTTGTTTTATCTGTCATGTTTTATCACAGCAATAGAAAC
CCTAACTAAGACTTCATAAACTAAGAGTCAAAGGATAGAAATCAATCTACTAAGCAAATGGAAGCTAAAACAAAACTGTTAGAACCATCTTCATACC
TGATAAAGTTGAGTTGAAACCTTCAAACCAAAAATAGCCAGAAGAGATAAATCAGATCACTGTAACGTTACTGAAAGGACAATTCTTCAGGAGCAAA
TAATAGAGACACTACCACAATACTCTTAGATCTGATAAACATTTTTAGCAAAATAACTGTATACAAAAGCAACATGCAAAAACCAAAAAACAAAAAC
GCCATAGCTTTTTAAACATATAAAAACAAGAGATGACCTAAGAAAGAAGAAAATAGGATAACTACACAAAAATACTAGGGCTCATGTTCATTAAGAA
ACCTTAAAATGCACAAAAAACCGATCCAGGTACAACAATAGTGGAAGATGTCAATAATTCCCACTCAAATCTTTTTTGTTTGGTTTGGTTTGGTTTG
GTTTTGCCAGATAGGGTTTCACCATGAAGTCTTGCCGGACTATAACTTGCTATTCGATCAGACTGGCCTCAAACTCACAAAGGTCCACAGGTTAGGG
TTAGGGTTAAGTTCTCCTGCCTCTGCCTCTGGATGCTGAGATTAAAGACTGTGACACCATGTCTAGTCTCATCCTTAGATAGGTCTCTGGGATGGTC
AGCTTTAATTGCCAACCTAATAAAGTCTAGGGTCAACATGACCTGAGAGGAGAGTCCAGATGAGTGACTGTCAACATGGAGTGTCAACAACTTTGGG
CAAGCCTGTAGAGAATATCTTATGTAAGTTAATTGATGTAGGAAGACCCAGCCCACTGTAAGTGGTACCATCCCCTTGGCAGGGTTCCTGATCTGTT
TAAGAGTGGGAAAATGAGCTGAGAACCAGCAGGTATGTGTGCATTCATTTTTCTCTCCCCTCAACTGTAGTTTTAATTTGACTTGCTGTTTGAGTTG
TTGTCTTGGCTCTCCCAAAATGATGGACTGCAACCTAGAATTTTAAGCTGAAATACAAACCCTTTTCTCTCTAAGTGGTTGTGTGTGAGAGAGGGAG
AGAGACAGAGACGGAGGCACACACACACTCAGAGAGGGGGGAGAGAGGGAGAGGGGGGGAGGGAGAGAGGGAGAAAGAGGGGTATTTTTTAAAATTA
CAGGAACAAAAATGAAACTAGGAGTTTCCAAACTAAAAGTAAGCAAAAAAACTTCACAATTAAAACATGTCAGGTATCAACTGGACTTAAGAGGTAT
CAAACAGACTGGTCCATCTAAAAGATACAAAGTATACATTATTCTCCTTTAGCCATAGAATCTTTTTTAAAACTAACCTGAATCTGTTGCCTACCTG
TGGATCCTGTTCTCCTAACTGAGCTGCCTTGTCTTGCCTCAGTGGGAGAGGATGTGCAGTAACTTGATGTGCCAGGGTGGGGTGATATCCAGAGCGG
CTCTCCCTATTCAGAGGAGGAATAGGGAAGGGGCTATGTGAGGAGGGGCCTGGGAGGAAGGGAGGCTGTGGTCAGAATGTAAAGTGAATGAATAAAT
TAATTAATGAAAAATAAAACAAAACAAGACAACGCACATTATAAACCACAAAACAATCCTTATCCATCAAAGGAACATTTGAAAACGCTTGCACTGC
ATTATACCATAGTAGAATAAAACTAAAATTAAAAAGTAACAGCAACAAAACCAACACACATTCTAGGAAAGTGAGCAATGAGTCATTGAAGAAGCAA
GGGAAGAAAAAATTTCAATCCCTAGAGTCAGATGAAAAGAACTGCTCAACTTACTAGAACTTCTGTGGCACATCTAAGGCATTCTGCAAGGAAGGTG
ATGGTCATATGTGTTTATATTAGCAAAAAGTATCAGGTAGACCTCAAATACATAATTAAATAATGGGGGGGGGGAGAGGGAGAGAGAGAGAGAGACC
AAATTTGTATGCAGAAGATTGCAAGAAAAATAAAGAGAAGGTCAGAGATCAATTAAATGGAGACTAAGAGAGCAATGCATACAGCCAGTCAGAGAGT
TGGTATTTGAAGAGATAAACAAGTTTGATAATCCTTGCAGAGCAAAAAGGAGAAAACTCTCAGATGAAGAAAGTAAGAACAAAGCATGGGATCACTA
GGGAATACTTTGAAAATTAATTTCAAAACCTCAGAAGTCCAGAGGAAATGGATACATTTCTAAACACATATGGTCTGCTAGAGTTAAATCAGGAAAA
TACAAGCAGCATAACTGGACTCAAAATAACCAAAATAACAACCAGTTGTTGAAGCAGTAACTAAAAATCTCCACACAAAGAAAAGTCTCAAACTAGA
TAGATTCACTGCTTAATTCTACCAACCTCTTAATGAAGATTTAACAGAATACTCTTAAATAGATTCACCAAATAAAAAGAGAAGGAACAAGACCAAA
GTCATTACACAAAGCCAATAAAATCCTGATTCCAGAGCCAACGAAGGATACAACAACAAAAACTGAAAACTGTAGACCAACTTCCTTTAAGAATTCA
CAAGCTCTTTAAGCGCTCACCTTTCTTACTCTCTAGCTCTCCTTCTCTCTCTCCCTTCTCCCCCTCTCTCCACATGGCCTCTCTCTACCTTCTCTCC
TTCCCCCTGCCTTTCTACAATAAAGCTCTAAAACAAAACAAAAAAAAAGCATTCACAACAAAATACTTGCAAACCAAATTCAGAATCCAATAGACAA
TGCATCTTAATCGAGTTACTTTCATCTCAGGAAAGCATGATTAGTCTAACATATGCAAATCAATACATGTATAAGGACAGAAATCAGAAGATTATCT
CAAGAGATGCAGAAAAGGCATTTGAAAATTCTCAATATCACTAGACATCCCGAAGAAACTAGGAATAGAAGAAACATTATAAAGACCTTGTAAAAGC
TTACAGCTGACTAAATGGGGAAAATCCAAGAGGATTTCTTCTAAACTCTAGAACAAGACAAGGTCCTCACTGTGTCTATTATTATTCAATATACTGC
TTAAAGTCTTAGCTAGAGCGACAAAGGAGGTGGAAAAATAATGGGAATATAAATAAGGAAGAAGTCGAGGTATCCTTATTTGCATATAGAGCTATCC
CTATTTGGAGACAGCATGCATACATTTAAACTCTACTCAAGACTCCACCAAAAACCTCTTAGATATGATTAAATAGTTTCTGCAAAGTAACAGGATA
CAAAACCATACAAAATCAGTAGCTTTTCTATGTAGAAATATGAAACCACCTAAGAAAGATAAGTTAAAAAAAAAAACTATTCACAAGAGCTTCAAAA
AGAGTTAGATGTGAACCTAATAAAGAATATGGATGCCTCTAAAGTAAGGCCTTTAAGACACTGAAGAAAGAAATTAAAATTGATATTAGAAGATGCA
AATGTCTTCCATGCTTATGGAATGGCATAAGCTAATATTGCAAAACTAACTGGACCACTGAAAGGGAATATAGTTTAATTCAGTGTCCAACAAAAGT
CTAATGTTTTTGACAGAAATTCTAAAGTTCGTATTGAATCATGAAAGTCATTAAAAAGCTAAAGCAGTCCTGAGAAGAAAACAATGGTGAAGGGATC
GAACTATCTGACTTCAAATTGTACCACAGCACCACAGTGACAAAGACGTTGGTACTGAACAGATTAAACCAACAGACTGGATTAGAGTAACCAGAAA
TTAGAGCCCACACAACTGTAGCCAAATAGTTTTTGATAAAGGGGTCAAAAACATACATATATACGTTAGAAAAAAAGATAGCTTCTTTAAATAATAC
TAGGAGACCCAGATAGCCACATGTCAAAGAATGGAATCGGATTAGTGTGTATCGTACTGCACAAAAATAAATTTGTAATTGATCAAAATCCTTAATA
TAAGGTCTGAAACACTGAAACTTCTAGAGGTAATTCACTCAAGACAGAAGNNNNNNNNNNNNNNNNNNNNNNNNNNNNNNNNNNNNNNNNNNNNNNN
NNNNNNNNNNNNNNNNNNNNNNNNNNNNNNNNNNNNNNNNNNNNNNNNNNNNNNNNNNNNNNNNNNNNNNNNNNNNNNNNNNNNNNNNNNNNNNNNN
NNNNNNNNNNNNNNNNNNNNNNNNNNNNNNNNNNNNNNNNNNNNNNNNNNNNNNNNNNNNNNNNNNNNNNNNNNNNNNNNNNNNNNNNNNNNNNNNN
NNNNNNNNNNNNNNNNNNNNNNNNNNNNNNNNNNNNNNNNNNNNNNNNNNNNNNNNNNNNNNNNNNNNNNNNNNNNNNNNNNNNNNNNNNNNNNNNN
NNNNNNNNNNNNNNNNNNNNNNNNNNNNNNNNNNNNNNNNNNNNNNNNNNNNNNNNNNNNNNNNNNNNNNNNNNNNNNNNNNNNNNNNNNTTAAAAC
TGTCCCCAGACTCAGAAAACAATCACCAACAAAGCCTGGCAAGGACAGGGGTGGAGCAGGGGCTGACTCCTTGTCAGTGTTAGGGCAAGTGTGAACC
CATATGGCCTCTATGGAGATCAGTATGGAGGTTTCTCAAAAACACTAAAAATAGAACTACCAATGACCCAGTCTTTTAAATCCTGGAATAGACCAAA
GGATCCTAAGTGCAATCAAGAGATGTTTGCCCATCCATGTTTATTGCCGACCTATTCACAAAGGGATACCCTGAGTGAGACAAAGAGGAGACTCAAA
GGAATAAAGAAGAGGTAACTACATGGTAGACATAGAAAAGATTTAATGGGTTGAACAAGTTATGAGTGGTCAGGGAATGGGCCAAAGTTCATGGACA
AGGCATTAATAATAAACAATTAGTCTCAGAGGTGTCTTTCTGAGAGCTGGGACTAGGAAGGAAAACCAGATTTTTTTTTTTTAACAAGGAGAATCTC
AGAGCTCCCTTCTCTACAGGTCTAATCTCAGAGATTTGTCCTAGGGATGGACCACAGCGGTGGCTGCCTACATCTGCCTAGGTCTCATTGGCCCTCC
ATCCTTATTCCCTGCGTTTTATGTAACACTGTGACCAAGGAGATGTCCACACACTCATTAAAGACTTCACATAGAAACAAGGATCAGAGTTGAGTGG
CCCAACTTTGGAGACCTGGGGAAGGTTTTAGAGCTCAAGTCTTTAGTCCAAGAGAATGGATGGATAGACGCATGCTGACTAAGGAGGAGATAGATGG
CTACCCTTTTGTTCTTACATTGTTCCTGAGATTCGCAGAATGGCATCTCACCCCAGAGGTAACTGAGTCCAACAGGCAGGGAGCCCCCATCATTTGA
TATTTTCCAGATTTGCTGTATGCCACCAAGAGAGCACACATAGTGAGAAAGGACCGTGTAGCCCAGGGCACCGGCTTTGGAAAGTGCGTGATGGGAA
TGGATGGAAAACATTGCTGTGGGTGAACTTTGTTGTTCCGGGTCTTTATTCTGGTGATGCTGTTGTCTTTGTTCAGACATCTTAAACTCAGTTGTTA
TGTCAGTATTAGTAATTCCAATTTCTTCTTTAATTTCCATGCAAGATAGGGCTTGCCTGTAAAGTGCACTGACAGAGGCAGCGTTCTATATTTAGTG
AGGCAGATGCTATCTGCAAATTACAGGGAAATGATTGCATCAAGGTCCCTGGTTGGTGAAATAAACCACAATAAAGAAATGAGGAGCCAGAGAGGGG
CAATGTTCTAGAAGTCACTAAGAACCAAAGTTGCTTGACTCTGACTGGTAATGATTTCTTGGTCCCCAAATGCCCTCCCATGCCCAAGCAGCATGGC
CTTCATGCCCTTGGGGTTAGAGGAAGAATAATCACATTGAACTATTTCCTCTACACCCTGAGAAAATGATTATCATCTTCACCGGACAGTTAAGTGC
CTAAACCTCAAACCACCAGGGCAACTGTGTGATTTTAGGAAGGACGAGAAACAGGGCATCTATTTTGTGACTTACCTAAACCCAGGAGCTATCAGAG
GGCTTCCTGACACTTTTAAAAGAAAAGAAAGCGTAACTACAAGGCAAGCATAGGGCCTTCCTGGGCCATGATGGAGCCGAGGGTTCAAGTTTGTAGT
GACCGTGCCATTTTCTTCCCATCCTGAATACAGAATTCACTCTGGGATTTTCATCATAGACAAACACAATTCAGGTCACCAGAGTAAACTGCTTCTG
TAATGGTAAATTTCCCAGCAGGTCTTAAAATAAATAGATAAATAAATAAATAAACAAACAAACAAACAAATACACACATACATACATAACATACACA
CATACATACACATATATTTTATAATAGTCTGTGCAACCTAATGTTATTTTTCAGCTCACATTTATTTAATTATTAGGAATCCAGGTTACCTTAATTT
TTTTGTGCTTGCTACACACTTTCATGCATACCAGGT
MOUSE SEQUENCE - mRNA
GGGACCCTTTGCTGCCCTCAGCTAAGAGTGCGGGTGAGCGCACAAGCCCAGGAGGAGGTCCGCACGCGTCATGAACTTGGAGACGGGCAGCCGGGGC
TCAGAGTTCGGCATGAGCGCAGTGAGCTGCGGCAATGGGAAACTCCGACAGTGGTTGATCGACCAGATCGACAGCGGCAAGTACCCCGGGCTGGTGT
GGGAGAACGAGGAGAAGAGCGTCTTCCGCATCCCGTGGAAACACGCGGGCAAGCAGGACTACAATCGTGAGGAGGACGCTGCCCTCTTCAAGGCTTG
GGCATTGTTTAAAGGCAAGTTCCGAGAAGGGATCGACAAGCCAGATCCTCCTACTTGGAAGACAAGATTACGATGTGCTCTGAACAAGAGCAATGAC
TTTGAGGAATTGGTCGAGAGGAGCCAGCTGGATATCTCTGACCCATACAAGGTGTACAGGATTGTTCCAGAGGGAGCCAAAAAAGGAGCAAAGCAGC
TCACTTTGGATGACACACAGATGGCCATGGGCCACCCCTACCCCATGACAGCACCTTATGGCTCTCTGCCAGCCCAGCAGGTTCATAACTACATGAT
GCCACCCCATGACAGGAGCTGGAGGGATTATGCCCCTGACCAGTCACACCCAGAAATCCCATATCAATGTCCTGTGACGTTTGGCCCACGAGGCCAC
CACTGGCAAGGCCCATCTTGTGAAAATGGTTGCCAGGTGACAGGAACCTTTTATGCTTGTGCCCCACCTGAGTCCCAGGCTCCTGGAATCCCCATTG
AGCCAAGCATAAGGTCTGCTGAAGCCTTGGCGCTCTCAGACTGCCGGCTGCATATCTGCCTGTATTACCGGGACATCCTCGTGAAAGAGCTGACCAC
GACGAGCCCTGAAGGCTGCCGGATCTCCCACGGACACACCTATGATGTTAGCAACCTGGACCAGGTCCTGTTTCCCTACCCGGACGACAATGGACAG
AGGAAGAACATTGAGAAGTTGCTGAGCCACCTGGAGAGGGGACTGGTCCTCTGGATGGCTCCAGATGGGCTTTATGCCAAAAGACTCTGCCAGAGTA
GGATCTACTGGGATGGGCCCCTGGCACTGTGCAGCGATCGGCCCAACAAGCTAGAAAGAGACCAGACTTGCAAGCTCTTTGACACACAGCAGTTTCT
ATCAGAGCTGCAAGTGTTTGCTCACCATGGCCGGCCAGCACCGAGATTCCAGGTGACTCTGTGCTTTGGTGAGGAGTTTCCAGACCCTCAGAGACAG
AGGAAGCTCATCACAGCTCATGTGGAACCTCTGCTAGCCAGACAACTGTATTACTTTGCTCAACAAAACACTGGACATTTCCTGAGGGGCTACGAGT
TACCTGAACACGTTACCACTCCAGATTACCACCGCTCCCTCCGTCATTCTTCCATCCAAGAGTGAGAAGAAATACTCTGACAGGGCAGCCGGCTGCT
GCCCTTTCTCTTTGGAAGAGCTAAGAAGTGAGTGGGTTTCCACTTGAAGACAACAACAGGGCTTTGTGAGGAAAAACAGCTGTATCTGCTCAACAGA
GGAGCTTCCCCCAGAAGAGTGCCTGTCATCCAGGTCTTGACAAGTGCCAGGACTTGGGTGACTGTGCCCTGGCTTATAACTGTGAAACTTGATCAGT
GTTGTGTTTACATGTACTTGAATGCTGGCTTTAGCCTGGTATAGATGGACTTTTGCTTGAAGACTGAAAACCTGTGCCAGCATGAATCCCTGACAAG
AGAAGACATACGTATTATTGGTCCATTTCTCAGGGAAGTAAAGTCTAGACTAGAGACTACGCTGTCCACTCACAGAGAAACGCATTCCTGGATAGAG
GAGCTGTAGGTTGCCCAGATCATGTCCACTGAGTGAAGGGACTTGGTTCTTAGGTCCAGTCTAGGCTATCATGTCCTGATCCTGCACTCTCTCTGAG
TAGACCCTACATCCTGTTTGCTCCCTCTTCTTGCCCTTCCCTAAAAGCCAGCTGGTGGACTCTTGTTGCCACATACTTGAGCCAAAAAACCATCAGG
GACATATAAGATGAGACATGTTTGCATCTCCTCTGATCTAACAACGGCTACAAAGTTTTTTGTTGTTGTTGTCTCCCCTTTCTGTTTTGCCTCTCAT
TCTTTAGAATTGTTGCTTTTTTGTAAAGAAAGGAAGAGAGAGAGACCGAATATACTAGAGATAGATTTTTAAAATTCTGTGCCATTTCCCCTTCTAT
TTGTTTTGTTGGCCATCAGTGGTCCCCATGGCAACACTGGAAGGGCGGAGCCTTTGAGCAGGTTGGGAACTGTCCCGGACACCAGTGGTTCAGTGTA
CAGCTGTAGACTCAGTGAGCTGTTTCTGCTTATTTTGTATATTAGATGCTTCCTTGTGCCAATAATAGTTTGACAGAGTCTCAAAGCTACCGGGCTT
CTTTTCCAACAACACATTCTTTCACAGAATCCCAAAGAGTCTCACTTGCCTTCACAACCGTCTGATCCTTTATTGTTACTGTTTTGTTTAGGTGGCT
TTGCCATGCTCTGGGATTTTTCTCCTACCACAACATCATTCCTGACTCTTTCGGGCTCAGAAAGAGTTAAGCGCTCTTGCACACTTGGCACTTACTT
CTTTTTAATTTTTTTTTTAACATGCCACTCTTAATATTTCTTCTTAAGTCTTTCAGCAGCATACATTCAATAAGCAATGGACCATTGGGTGTCTCAT
TTCATTGTTTTATTTTTAAAAAGGAACCTTTGACAAATAATACACATTACAGAAAATGGAAGCATTTTTCATAGAGAAGGTAAGAACTGAAATGCAT
TTTATGTTCGAATCCTCCTTGCTAGTATTAGCCCCAAGAGTTCAGTCTGTCCTTTAAGCATGTTTTAGTTTTCAATACATATATATGAAGTTGCCCT
TTCTTAGAGAGAGAGAGAGAGATATGTGATGACACTCTTATGTACCCAACTATACAGATTTACCTCATCTTTTGAGTGGCATGTGGACTTCCACTGC
TATGTGCCTAGGTGCAGTTTAGACATCTTCTTAGCTACCCATCCCAGCAGCCCACTGAGTCTCGTGAACTAAAGTCACTTATACATCTTATAGATGC
AAAACATTCTGGGGTATATTATCCCAAGGGAAGATGAAGGCAAAATCGGGAAGCACTCTTCCTGAGGCCCCAAGCCACAGCTGTCCTCCTGGAGTAT
CTTAACCATATCTGGCACTTCACCAAGGTCCCTTGCCTGGTCCTGTATGACCATGACTCTTCAGTCCATAAGCAGATGCTTTGTCTCAATTGCCATG
TGAAGTCTTTTGGTTTTTGGTTTTTTTCCTTAATGTTAAGCTGTTTTAACAGTGAAGCTGAATTTTCTGGAAAATGCTGTATGGTTCGAGCCCCCAG
TTCATGTTTCACTTTACAGCCATGCATGCTGATGCCTTCCATCTTGACAAATGGAATGATGGGTAAACACTCCTGACACAAAGAGGAACACCTTCCT
CGTCCCTTGCTGAAACAAAGTGCAATGCACACAGTAGAATTTAGTTTGCTTGCACTGGAAGATGCCGTTGAAGAGGTAGGCTGAGGAACACTGTATC
CTAGGGAGAAAATATGCAAGTCTCACGGGTGCTTTCTGTTGGCTTGTTTCTGGTCCTTGAGCAGGCTTAAGTATCTAGTTTCAAACTAGAAGCCCCA
AAGCCCTCAGTCGTTGTCCTGGACAGAGTTGGTAGACCCCACCTGTAGAAATCCAGATGCACTCTGGGATTGGAGCACAGAGAGGCTTGCTCTATCG
TGAGAATGCCCAGCCTGCAGAGGCCCAGGTGCGGTGCCTGAGTGGCTGTATGCCAGACACAGGAACGCCAGCAGGCTGAGTGTGGTGACTGATATGT
GAGGTGCCCTTGCCCTGCAGACAGGCTGAATGTGAGCCCCAGCAGCAGAGGATTCTGAGAGTCAGGGTGGTGTCATGTCCTACACAGGAAGAGCCTT
CAATATTACTTTTTAAACGAACTTTCCCATTGCTGATATTTTGATAAAAACCCACACAAGGTTTAATTACATGCCCCCTCATCCCTCTCCACACAGT
CTTGCCCATCCCACTGGTGAATTGTTGTTGTTCTTGTTGTTGTTTTTTGTTATTGGTGAAAATTGTGAAATTGTTAAGGTCTCTGTTTTTGTTATTT
ATCTCCCTAAATCACATGGCTGCTGCATACATTGCAATGTTGCCCTACCACATGTATGTTTTTGCAAGTTGCTTCTTCACTCATTGAAGAAGCCTGC
ACCGTAAGTGAAACTCACTTAGTCCTTGCTAATTGCTGCTCACTGTCACGTGAACGCAGAGAAGGCTGATTTTCCTGGACCCATTTTCAGTGCTTTG
AGGAACATGAGTCCAGAGTATATTGAAGTAGAAGACAGTGTTTGGCAAGCCAGTTCTTATTAGACACTGCTACAGGCTTCACAATCTTCAAGGTGGA
CCCACCTCATGTGGAAGGGCATCATTGCCCCTCTGCTCCCATGCGCTGTGCACCCCCTTCACAGTGAAAGACCTGCTGGGGACCAGGACTCAGAGAT
CTCTGGCTTCGAGCTCATATCTTGGCTTCCTGTCATGTCTAAGCCCGACAGGAAAGTGTGGCACCATCCTGCCTGCGGCGTTGGATGGATAGGCCAT
GGATTTTGCTGTAAACTTGCTTCACAA
MOUSE SEQUENCE - CODING
ATGAACTTGGAGACGGGCAGCCGGGGCTCAGAGTTCGGCATGAGCGCAGTGAGCTGCGGCAATGGGAAACTCCGACAGTGGTTGATCGACCAGATCG
ACAGCGGCAAGTACCCCGGGCTGGTGTGGGAGAACGAGGAGAAGAGCGTCTTCCGCATCCCGTGGAAACACGCGGGCAAGCAGGACTACAATCGTGA
GGAGGACGCTGCCCTCTTCAAGGCTTGGGCATTGTTTAAAGGCAAGTTCCGAGAAGGGATCGACAAGCCAGATCCTCCTACTTGCAAGACAAGATTA
CGATGTGCTCTGAACAAGAGCAATGACTTTGAGGAATTGGTCGAGAGGAGCCAGCTGGATATCTCTGACCCATACAAGGTGTACAGGATTGTTCCAG
AGGGAGCCAAAAAAGGAGCAAAGCAGCTCACTTTGGATGACACACAGATGGCCATGGGCCACCCCTACCCCATGACAGCACCTTATGGCTCTCTGCC
AGCCCAGCAGGTTCATAACTACATGATGCCACCCCATGACAGGAGCTGGAGGGATTATGCCCCTGACCAGTCACACCCAGAAATCCCATATCAATGT
CCTGTGACGTTTGGCCCACGAGGCCACCACTGGCAAGGCCCATCTTGTGAAAATGGTTGCCAGGTGACAGGAACCTTTTATGCTTGTGCCCCACCTG
AGTCCCAGGCTCCTGGAATCCCCATTGAGCCAAGCATAAGGTCTGCTGAAGCCTTGGCGCTCTCAGACTGCCGGCTGCATATCTGCCTGTATTACCG
GGACATCCTCGTGAAAGAGCTGACCACGACGAGCCCTGAAGGCTGCCGGATCTCCCACGGACACACCTATGATGTTAGCAACCTGGACCAGGTCCTG
TTTCCCTACCCGGACGACAATGGACAGAGGAAGAACATTGAGAAGTTGCTGAGCCACCTGGAGAGGGGACTGGTCCTCTGGATGGCTCCAGATGGGC
TTTATGCCAAAAGACTCTGCCAGAGTAGGATCTACTGGGATGGGCCCCTGGCACTGTGCAGCGATCGGCCCAACAAGCTAGAAAGAGACCAGACTTG
CAAGCTCTTTGACACACAGCAGTTTCTATCAGAGCTGCAAGTGTTTGCTCACCATGGCCGGCCAGCACCGAGATTCCAGGTGACTCTGTGCTTTGGT
GAGGAGTTTCCAGACCCTCAGAGACAGAGGAAGCTCATCACAGCTCATGTGGAACCTCTGCTAGCCAGACAACTGTATTACTTTGCTCAACAAAACA
CTGGACATTTCCTGAGGGGCTACGAGTTACCTGAACACGTTACCACTCCAGATTACCACCGCTCCCTCCGTCATTCTTCCATCCAAGAGTGA
HUMAN SEQUENCE - GENOMIC
TCCTGAGATCTTATCTTTGATATAAGTTAGCTCCATTTACACTTAGCAGATAATACCAAATTAAAACAGAGACTGAATTCAGTGAGCAGAGAAAACA
GCCTAGCCCATGGATTTGTTCTCAATGCACTGCCTCCTGGCTTTGGTGATTTTGCAAAGAACTGAAAGAAAAAGCACAACATTCAGAATAGAAAGGG
AATTTCTGAAGGGAGTTTCATAACTGAAATTTCACTTTGAACTGGATGAGGGACGCTGTTTAGTTCAGTGACCACTGAGGACCTCCGGCAGGCTTCG
GGGTGTACAAAGACAGCCAGGATTCAGCCCGCCTCAGTGGAGGGCCCCACAGCACAAAGGGACCAAGAAGGGATAGCAAGAGGACAGCCAGAGTGCC
CACAAGCTCGGCAGGAAGGAGGCTCACATCGCCGCGGAAGTCTCGTGATGGTTCTGGTAGAATCGTCCTCTTGAAACCTTCTGCTGCCATTATTGGG
TTCTGTCCAATATGCCTTACGCAAAACACTGACAATAGCATACACCTTTCCAGAATGCCGGCACGCGCTGTGCAATGCCCAAACTGTCCCTGTGAGT
TGAATGCCCCTGGCAGGATGCGTGTCCACTCCCGCAGGGCCGTGGGTGCCTCCCTTGTCTCACTCCTCTGCTTCAACCCTTCCCAGAACTCTGAAGG
TTTGAGATGAAATGACTGAGCCACACCTAGTGCAGGAATGAGCACCAGGGCCTCTCTGCAACGGCTGCTTAAGGGCCACAGGATAAGCATAGTGTGG
CACCCCCAGTTATTCCCTGTTTCGCTCATTGGACCACCCTGATAGGCTTCAGGGAGGCAGGAACCTCCTCTAAGGCAGCAGGAGAGGGGTGGATGGG
GCAGCCAACAGGTGCATCTCATGCCTCCGTGTTCTCCATAGGGAGGGAGGTGGGCTAAGAGGCGAGTGGGGCAGAGGCCTGGGCCAGCGTGAAGTGT
CAGGAGTAAGGGGGGAGAAGACTGGAGGGGGCAAATCCAGGAGGCAGCTGAGGCTGCACTGTGCAAATACAAGCCCGGTTACGTCTGTGTAGCTTAG
CTTCCCCAGCCCACCTGAGCCAGAGCTGGGTCTGCCCGTGCTCCCGCTTCTATTGACATCCAGCAACTCCAAATGACCTCTCCCATATCAATGGGCT
CATCTCCGAAGCCGAATCTTATAGCCTGCTTCTCCTCCCCACCAGGCTATAGTGGGAAATCATTGAGGAAACTATGGTTGAATGCATCGCACGGCCT
CTCTGGTGTCTGAGAGAAGCTTCATAGCCAGCAGGCTGCCCCTGGTGGGCAGGTGCCGCATGGAGGTACCACGCCTCCCGTGCAGCGAGTAAGAAGG
GCAAGGAGAGCTTGTCAGGGGAGTGGGCCAGGCTATCACATCAGATGGGCCAGGCCTCGCATCGCTCTCTGCATCCTAAGCAACGTCTGGACTTGAG
TGCGTGGGTTTGTGGTACTGCAATGCCACAGTACCTTGGGGAGCCCCCAGGCAAGCCAAGAAAGTTCTGGGAGGCCACAGCCCTTCACTCAAGTTCA
AAGGTTCAAAGCAGGGATTCTGTGTCACACTTGCGAAGGTGCCCACCCCAACAGAAGCTGTGGCTCTGCAGGACACGTGCGGGGTAGACCTCTAAGG
CCTTGTCCCAGTGGAAATGCCCTCCCACTTGGCCTGGGTAGCTGCTCACGCTTCTGAAACGGGAAAAATCAACTGCATTCCTGAATGGGAGCCTCAG
AGCATTAGAAAAGATAATGTTCTGATTTTTTAAAGCTAAACGTATATGGAAGGAAGCTGAAAGAGGACTTTTGATGAGTCACCTAATGTTGATGTTG
AAATAAACCTAATGACCCTCTGGCTAAAATCTGTTCTCATTTGGGAAGCACCTGAACCCTCATTCTCCCGCCACTGCTCTGACCTCTGGAAAGCAAG
GAGCAAAGGCACACTCAGCAGCTCCCGCTCCAAAATGCTCTCCCGAGTCCTCCCAAGCAGCCAGAGGACGACTCCACACCCAGAACCCAGAGTGGCC
TGGGAACCAGGCCTCAGGTTCCTGGCCCATTTGTCATCGCCCAGGGTCCTCCTGCCAGGAATCCCCCCACATCCTGCCCTGCCTAGAGAAGCCCAGC
TCTTCCATCAAAGTTCTGCTCAAATGTCACTGCATGTTACGTCTTCCTCACACACTCCCACTAGCCTTACTGCATCATGCTTGGTTTGCTGAGCTAT
GTGTGGGGTCTTTCCTTGCCAACCCTTCTTTCCCTGAGAGGTGCAATGACCTCATATTGAGGCTGTCCACTCCCCCACTCCCGACCCCATCCACCAA
GCCTGGGAGGCACTGGCTTAATGCATCATGGTTAAAAGAAATGGATGGTTGAATTGCACAGAGAAGACACTGTGCCCCAGGAGATGTGCCTTGCACA
AGATCCCTGCAGCACATGCTGGGAGGCTCTGCCCGGGTAGCACTTAGGAAAGAAGGATGTATGCCCTGGGCTGCTGGGAGCACTGTGGGAACTCTGG
GATCCCCCTCCTCCTAAGGGCTGTGCTACCCTGATTTGGAAACAATACAGAGGCTTCTCTCCTGCAAGAAAACATGCCCCCTGCCCACCCAGGATCC
ACCTGGCTGGGGAATCTGCCTAGCTGGGGACCAGGTGGGCATGCTAAGGAGGAATGGGGCTGTGTCTGAAAGAAAGAGATGCCAGCAGGATCCAGGA
GAGCAGTCACGGTCCTGGGGTCTGAGAGTGCTGGGCCAAGGAGGTGTGGGGAGCATAGATTCATATAAGAGAGAGTGGTTCAGTCTGTGGCCATGCT
CCTGGGACACAGCACTGAGCACCCAGCAAGGCCCCAAGAGATGCTGAAACACACAGCTAGGATGGCTCCCAGGAACGTGAGACAGCATTAACCACAG
GAAGCCAGGCAGAAGTGCTGCAGCCAGGGCGTGCTGTGGGAGAAGGGCTGGGAGGATGCAGCTCGCTCGCACACTGCGTCAGAAACCTTCACATAGT
GCTTGTCCTCAGTACGAGCCAAGGTGGGGGTGAGGAACGGCCCACTTACCAAAACTCTCAGAGACCCCTTGGGGAATTTGTGCTTCTTGTTTCTGCA
AGTTTCCAGGAGACACAGAAAGGGTGCCACTAGACTCTAAGCTGTGGGAGGCCTCTGGGAGGCTCCTTGGGTGGAGCTTAGCAGCAAGAAGGCATGT
TGACCTTGGTCATCAGGAGGTGTGGAGCTGCTGCTATACAATGGGGCAGGACCCCGGCAACCCATCCGGGCACCTCTTGGCTCTCCCTGTGTGTATT
GATGGAAAATGGTATGTGGAGGTGCAGCACCCCTGGACCAGGAAGGGCACCGTGACCAGTTCAAAGCCCTCAAGGATGAAGGCTTGGGTCTGGCCAC
TGAGCTGTAGTTGAAAGGTGGGAGCATCTAGAAAGGACAGAGCAGGAGGCGCTCACGAGTCTTCACTGGCGTTCCAGCTGCAGGGGCTGAGGCTGGA
ATCTGTTCCACTAACTTTCCTCTTCTAAGTTTTCTCCAGGATAAAGTTGCTATTTGAATTTCAGATAAACAACAAGTAGTTTCTTTAGTGTAAGTAC
GTCCCAAATATTGCATGGAATACACCTATACTAAAACAAGTTATTCAATGTTTATCAGAAATGCCAATTTAACTGGGAGTTTTGCATTTTTATTTGC
TAAAACTGGCAACCCTCCTCCAGGGATGGAGGCCCACTGGAACCAGGAGGAGCTGCCCTCAGGAGCTATGAGAGGAAATGGATCACAGCAGAACGAG
GTGTAGACTTGGGTGGATGTTGCTGTGCACTGCTTGGATTCCCACTTGGGAGTGAGAGGTTCATTCCCTCGGGTACTGAGACTGCTCCTGGGAGGTG
GTTCTCAGCAGGCAGCCTTCTGTGGCGATGGCTCCAGCTGGAGAAAACGAACTTCCCAGGTCACGTCTCCTCTAGAGGCAGCTGGCACCCAATGCTA
GCTCAGTCAGGGCTGCGGGGGCCCTATCCCTTCACTCCACGCTGGAACAGGCTCGTCCTAGCTCCAGAGCTTTCTGCAGCATTGACTGGAGTCCATT
TGGCTTGGCGTTGCATCACGGGCACCTCTCGGCCCAGTTCTGCTCCCTTCCCCTTGACTCCAACCAAGCATGCTCCCTAATCATACATGCTGACCTC
CATCTCAGAGTCTGCCACCGTCCCTGTTAAAGGCTGAAGGAGGACTAGGATCACTGTCAACAAAAGCATGACCCAAGAGGCAAGACACAGTCATGTT
TATAGCATATTACTATGAGCCACTCACTACTTCTAGATGTCACGGTTCAAAGGTGATTGAAAGAAACTCTGTGTTTCCCAATGCCTGCTGGATAAAT
AACTCAGCATGGATGGTGAGACAGCATCTCTAACTTCGCCTGTCTCCCCGGTAATCGTGTTCCTCCTCCTCACTTCTTTATCAGGGTTCTTGGTAAT
AGTAGTCCCCCCTTATTCTCAGGGGATAGATATGTTCCAAAACCCCTAGCAGATGCCTGAAATAGAAGACAGTACTGAGCCCCTTATAGACTATGTT
TTTTTCTGTACGTACATAGCTAGGATAAAGTGTAACTTATAAATTAGGCACAGTGAGAGATTAACAACACTAATAATAACACCAAGCAATGATGACC
ATACGCTGTAATGAAAGCTGTGGATGTTGTTGCTCTCTCCAACATCTCACTGCATGGCACTTGCCCTCTAATGGCCTGATGGCTGCCACATGGCTGA
TGGGCCAGCAGCATATACAGTGGGGTCTGCTGGACAAAGCAGTGGTTCACATCCCAGAAGGGATGAAGCGGGACCCTGCGCGATGTCACCACCCTGC
AAAGAATGGCATGCAACTTCAAACACAAAGTGTTGATTTCTGGAATTTTCCATTTCTTATTTTCAGACTGAGGTTGCCCTCAGGTAACTGAAACTGT
GGAAAGGGAAACGGTGGATACAGGGGACTCCTGTGTCATTCCCCATCCTGGAAACCCTCCAGCAACCCCTGACTCCCCGACCGCCCCACCCCCTGCC
GAGCACGTCTACTCAGCCCCATAACTGCTTGTCCTTCCCTCCTCTGCCACCCATGCACCTGCCCGTCTGAGAGCTCTCTACCTCACCCCGAGGCCTC
CCCGGCCTCCTGGCCATTGTTCTCTCTCGGGCGGTACCCACACTATGGCCAGATAATTCCTCCTTTACTGTAGTTCTTACCTTATTACGGGGGAATA
TGAGCCAAAGCCATGTAACTCGCTGCCGGGCAGGAACTAACAGAGCCAGCACATGCTTCTCCCGTACCCTTCTCTCCATCAGGTGGCCAGGAATGTT
CCGGATCCCCGTGGCTTTGCCATGGATATCTCATTTGAACAAGAAGTAACCCCCCCCCCAGAATCTCAGGGGGTCTCGTTACCACAGCATAACCTAA
CCTTTCTAGAAAGATACACTCCTCTATCCAGCATGCCTAGAGTCTTATGTGTGACAAGTGACGGTATGCTGTTTCACAAAATTTCGCTGAAAGAGCC
GTTGATGAACTTTAGAATAACCCAACATTAGGCGCTGTTACAAATGGGTGGAATTAGACAAAGCCGTTTGCCTTTCACCTCTTGCTTCAGTTTTCAG
AAAATTGCCCAAAGGTATTGCAAACCATTTGCGTTTTCATTGGCTTGGTTAAGGAGTTGGCAGTGTCAACTGGCCCTGTGTAAAGCCACGTCACTGT
TTCTGTAGAGAGCATGACACGTCAGAGAGGTGGGAAGTGTTGCCAGGACTCTTCTTAGAATGCTGGCAAGAAGAGCAGGCGAAAAGGGAAGAGCTGT
TTATAAACAGGGAAAGGAGACATCACCTCGTATCCTTGGCTTCTCATTACGTCATCGATTACAATCACAAGTCTCATTTCCTACAAGCCTGAAAGCG
GGTTCTTCTCTGCATGTAGGAAAAAGCCCCGCTTACTAACTCTGCCCTCAAAGAGATCACAAGCTGGTCCTGAACGCCCTGTGCCCTGGGAATGCTT
ACTGTCGAAGCTCTGCAAATTTTCTCATTGAAGGCACTCAGGGCATTCTGCTAATTAAATTAGGAAAATGTGTACAGCTCTACTTGAAAAAATCCAG
GTTTATGCTCTGTATTCTATTACCAAAGAATTTATCACTTTTCAAATAACATTCAATTATTTTAAACTGAGTGTGCAGTGAGAGCATTTATAATATA
ATCTCATTTCCAGAGTGTTCCATCCCAACTCCTCTCTGGTATAAGTAGCTTAGAAGGTTAGATTTTTTTTTTCCAGAGGATTAAACATTCGAGAAGA
GTGGCTAAGAGGCAGCACCAGGTTTCTCTCATTTCCTCAAAGAGAATTTAGCCTTGTGAAGAAGAATAAAGTGAAGGTCAATGGTTAGATCCATGGC
TTAAAAATAAAATGCAGCTTTCCTTACTCTGAATTTACCATAACCAAAAAGGCCACGAGGCAGCCATTAATGATCCTAAGTTGCAACAGAAAGAAAA
AAACACCTACTTAGGGTTAAACGAGGATTCAGTGGTCACTTGCCGCCGGCCTCCACTTCACAGGGGCGGAGGATGAGGCCAGGGAAGACTTTCTTAC
CCACACTGACCTGACCAGAGATGAAACTCCCCCTCCTATGACAGCCTGCACTCAGAGGCTGATTCTGAAATAGTCATGCCAAATGCAGCCAATCCCT
GTGTACAAGGAGAAAAAATAGTTCCTCAGAGCTGTGTCCTTGGGCCAGCCATCTGGACCTCTCACAATCTCTTTCGTTCTCCCTACACTTGGGCTGA
ATCCCGCCTTCCTTGCCTGCCAGGTTTGGTTTGGGGGCCAAATGAGTGAAAGTCCGTGAGATACCCCTAAGTATTGAAGTGCGTAGTAAATGATAAT
AGCCCTGATTTGTTGAACATGATGATGTGCCAGGCATTGCGCAAAGCATCATTTCATCATCACAACAAACACTGCTGGGAGGCAGGGACACCCCCAC
CCTCCTTGTACACCCAGAAGTAGGACTTTGGTTAAATGGCTCTCCCAAGGCCTCACAGCCTTAAAAACTCAAGCACTTATTTAATCCCCAATGATAC
TACCTTTTGGCCATGCAATGTGTCATGGCCAGTAATTAGATTTGCAAACACATATAACCAAAGAGGATTAGAAGAGACATATATTCTATATAAATTA
CATGAAAATAGCACTTTCAGTATTTTCCTGATTTTTTCTGGTAATTAAAAATGATTGCCCTTTATATTTCTTTATGGATACAGTTGCATTGTTTTTA
GCCAATTGTAGCCCCCCCCTTTAAAGAGTGAATTAGTGGGAAAATAGTGTTATCCAAGATTTTAAGAATCTAGTGTGTGTGTTTGTGTGTGTAGGAT
GGGTTTTTCTGAAATATTTTACTTGCATGTGAATGTATAATTTTAAAGATTGGCTTTTAAAATACTGAATTGAGGTAAATTCAGCTTTTCTTGCAGA
CTCTTTACGATAAATGTGAAATTGAAAATGGAAATGCTCCATTCAGATGGTGTGCCGACTACAACCTCAACATACGGATAATTCACTAAATAAGTAA
CTTCCTCGTGGAATATCACGGTCAGCCTTTGTTTTGGGTACACATTCAATGAACTGGTTTCCTATTAGTTTCTGCTTGTCAACAAGTTGTGTCATTT
ACTGATAAATATCCAGCCTTTTACTAAGGAATACCGATTTTCTCAAGTCTCAGTGTGTGGAGGGGGTGGGAGTTTGGTGGGGAAGCTTTTCAATTTG
AGAACCTTTGCCGTTTTTTGTTTCAATCGTGACTAAGATATAAAAGTCCTTGGTCACCACTGCCAGCTGCTACCTGTTCACTGCCTCCCTGACGGGT
TGAGTAAACCAGAAGATGGCGTTGAAGATTAGCAATTACATTTAAAAACAAGGTAGTGGTGTGAAGGCTCAGAGTTTCACACAACGACTGTTGTTCT
GAACTAAAAGCAGAGGATGTGGATGAGTGAGGGGAGGGTATGTTGAAAATGACTAAACCCGGTGCAGAGGACACGTATACGAAAGTGCAAAAAGCTC
TCATTTGCCATTTTTTGTCCTCAGCAAACTCCTCTCTGGTATGTTTGTGAACGTTTGAGGGAAAGGTAACACTGATTAAAATATAATGCAACAAGAA
GGCAACGATCTTTGCTTTGTTCACTGATGTGTTCCAAGTGCCTAGGACGGTTCCTGACAAGTAGCAGGTGCTCAAAATACATTTGTCAAGTGAATAA
ATCTGTGAAAGGAAAGGAAGAAAAACAGGTTGTGACCAGAACTTTTTGTGAACAAAACCCTGTTGTTTATTACATAGACTTTGGTAATGGAAAACTT
ACTTGGGTGAAATAAAAAATGGCATCCTGTTAATTTCTGAGAACGTCTGTTGGTTTTAGGAAAAGCATACCTATCCATACCTCACTACCTGTTTTGC
CAAAAGTTGCAGGTTGACCTACGGTGGTGGTGGTCTAAAATCATATAGAAACCAGAGATCTGATGGTTTACCTGAAAATGCGAAGTAAATGCACATA
CTCAGCATCTCAGACGATCGAAAGCTCAACGGGTGAAAGCTCAGGGGGTTAATTTTGCGATTAAGGACATCTTGGAAAAGTATGTAAAATCCCTGGT
CCACTTAAGTATTATTCCTATTTTGGGCTTTTATTTATTTATTTTGAGATGGAGTCTTGCTCTGTCGCCCATCTCGGCTCACTGCAACTTCAGCCTC
CCGGGTTCAAGCGATTCTCGTGGCTCGTCCTCTCAAGTAGCTGGGGCCACGCCCGGCTAATTTTTGTATTTTTAGTAGAGATGGGGTTTCACCGTGT
TGGCCAGGCTGGTCTCGAACTCCTGACCTCAGGCGATCCACCGCCTCGGCCTCCCAAAGTGCTGGGATTACAGGCTTGAGCCACAGCGCCTGGCCTA
TTTTGGGCTTTTATACCCCACTGGTAAACTGCTTTCCTCCAGGTTGAGGTTAAAACGACATCATTTTAAGGTGAACTGAAGTCTGGAAGTGATTAAG
CACTTGGATCCTTAGGGAGCCTCTCCCCGCCCCCATCTCTTTCATGCTAAGATAATTAAAACTTCGGGGCCGGGGCATTGTCTGAGTCACTTCAATT
CACCAGCCTAATAGATGCAAAAGGATGTAAGCATGTCAGACACGCAGAGACAGTATTTGAATCAAGCTTAATAGCTCAAGGGAGCTGGGCCATTTCC
TATTTTCTTTTTAGTGAGTGCGATGTTCTCTAAACACCGCGGAGAGGCAGGGTTCCCGGTGATGGCCTTGCCGAGGGTGCTCCCGCAACCTCCACCT
CCAGTTCTCTTTGGACCATTCCTCCGTCTTCCGTTACACGCTCTGCAAAGCGAAGTCCCCTTCGCACCAGATTCCCGCTACTACACGCCCCCCATTT
CCCGCCCTGGCCACATCGCTGCAGTTTAGTGATTGACTGGCCTCCTGAGGTCCTGGCGCAAAGGCGAGATTCGCATTTCGCACCTCGCCCTTCGCGG
GAAACGGCCCCAGTGACAGTCCCCGAAGCGGCGCGCGCCCGGCTGGAGGTGCGCTCTCCGGGCGCGGCGCGCGGAGGGTCGCCAAGGGCGCGGGAAC
CCCACCCCGGCCGCGGCAGCCCCCAGCCTTCACGCCGGCCCTGAGGCTCGCCCGCCCGGCCGGCCCCGGCTCTCGGCTTGCAAAGTCCCTCTCCCCA
GTCCAACCCCCGGCCCCCACAGGCCTCGGCGCCCCGCCCCGCCCCAGGCCCCGCCCCAGAGAGTTCTATAAAGTTCCTCTTTCCCACCTCGCACTCT
CAGTTTCACCGCTCGATCTTGGGACCCACCGCTGCCCTCAGCTCCGAGTCCAGGGCGAGGTAAGGGCTGGAGTCGGGCAGGAGGAGGGGTGTGAGGC
TGATACCAGAGAGGACCCGGAGCGCGAACCAGAGGTTCGACCTCCAGGGCAGCGCAGGGTACCCCGGCTTCGGAGCGGGAAGGGAGCGCGCCCCGTC
CTGGAGCTCCGACTCCCACCCCATCTGCGCTGAGCCGGAGGCGCGGGTTTGGGCTCCAAGGCCCGCCTCCTTGGCTCTGCCCGAGCCTCCCCGCCTG
CCCTCCGCGCTCCTGCGACGGGGTCGCCACAAGCTGGACGGGATGAGCTAACCGGACTGTCGGGGCCCCAGGAGTGGCTGAGGCGGGGCCGTCCAAG
GCACCCACACAAGACGGCACAACTGCCTGCGAGAAACAGGCCCGGCCCTGTGGACCCCAATCCTAGGCTCCTTCCCCTGCTCTTCGTTCCTAAGGGG
CCCAAGCTCACGGCGGCCTCCGGCGCGGTGCTCACCCGCTGGCGCAGGAGGAGGAGGAGCTCCACATTTGGGTCGCTCCGAGCCTTGCGTGCGGTGG
CNNNNNNNNNNNNNNNNNNNNCTCCGGGGTCCGGCGGACGCTCTGCGCGCGGAATCCCCCGTACTGGGGCTGCAGCCCCCGCGTCTGCGCCACTTGT
AGGAACCCGGGGCTGCGCCCCTGGAACGCCCGGCCGCAGGCGAGGTCCTCCGCGCGTGGAGGCCGCCAGGGGAGTGGAAACTGACAGAGTCGCGGGA
AGGGGCGAGAAGCGGGTTGGGAGTGAGCGAAGGCAAGCGAGAGCTGCGAGTGAGTGCGGAAGGAGGGCCAGGAGGGGTGGCGGCTGGGTGGGGAGAG
AGGGTGCAAGACGAGCGGCGCGTGTCGGGAGCCTTTGGGCTGCGGGTGCGTTACAGGAGAGCAGGCGGGTAGGAGCCTTCGCGGGGGCCGAGCTCGG
AAGGCGGACGGCTGTGCCCGCCCAGGGGATGCGCCCGGGCCGGCCGCGAAGGTGCCTTCTTCCGGGGGCCCGGACGACCCTGACACGGCACGCGCGC
GCTTCGCAGCCTCAAAGACTCCGGGGCCTCGTGGTCACTGGCGCAGGGGATCGGGGCGGGGTGCCCGGAGTGCGGTGCCTCGTGGCTGAAGGGCAGC
TCTTCTCCCCGCAGTGCAGAGCAGAGCGGGCGGAGGACCCCGGGCGCGGGCGCGGACGGCACGCGGGGCATGAACCTGGAGGGCGGCGGCCGAGGCG
GAGAGTTCGGCATGAGCGCGGTGAGCTGCGGCAACGGGAAGCTCCGCCAGTGGCTGATCGACCAGATCGACAGCGGCAAGTACCCCGGGCTGGTGTG
GGAGAACGAGGAGAAGAGCATCTTCCGCATCCCCTGGAAGCACGCGGGCAAGCAGGACTACAACCGCGAGGAGGACGCCGCGCTCTTCAAGGTCTCC
GGCCTCGGGAGCCGGCGGGGGCGCGCCGGGGAGGGCCCAGAGACAGAGCCCGGGGTCCCCGGCGCCGCCTCCGAGGCGAGCCCAGGGGACCGCGCGG
GGCGGACGGGCGGGCGGCGGAGGCATCAGGTGGCGTCGCCGGAGCCGCAGGAGGAGGAAAGGAGGCCTCGGCTCTCAGCGGGACCGCGGGGGCCGGG
AGCCGGGTCCTGGGCGCGTGGAGGCTGCAGGGAAACCGCTGAAGGCCCGGCCGGGCCCGGGGAAGGGCGGCCAAAGGCTTGAGGGGTTTTGCGCGTT
CGTCCGTGCGTTCTCGTTTCCACGCAAGCCTCCCGCCCTTCCTCCGGGCTCCCGTCTGCCGCCTCCGTCCGTGGGTCCCCCTCGCCCTCTCCGTGCG
TCCGCGCCTGTGCCGGCGGCTGTTTTCGTCTCTCACCGCGTCTCTGTTTCTCTTTTCGCTGCTTTTCTCTCTGAGTCTCTCTCTCTCCATGTTTTTC
CTGAGGTCAGCCTCTCTTCTCGCTCCTGCTAGCTCTCTGCGGGTACTCCCACCTCTGTCTTTCTCTTTGTGTGTCTCTGTCTCTCTCTTTCCCCCAT
CGCAGTGGAACTCAGGGCCTCTGTCTAGAGCTGTCTCCCTTGCCCTTTGCGCGAGTGCACACACGTGTGTCGTTGTTACGATTGTTCTCCCCTAAGG
CAGTTTACCCAGAGAACTACGTGTCTGGGCCCAGCCCCCACCTGTGGGCAGAGCAGGGGAAGGGGACTTCCTCCGGGAATTTGGTCTCAATTTGCTC
TCAGAGTGCCTCAGCTGTGCTGCCATCCAGATGTCTCCTGTGGGTGACAGCTCACACCACAGCTGTCCTTAGTCCTAGGCAAGCTCACTCAGACACT
GGGTGGGTAGAGCCCCCTGAAGGAACCTCCGCATCTCACTCTACCGGTTATAAATACCCAGAAAATGTGTCTTCAACTTGGCAGTGATAGGGTCCAA
GATGGAAAATCATTTTCCTAGAGCATAGCTGGGGTCTTTCAGTTTACGTTCTGAGCAACGGTGTAAATCTGAAGGACCTATGCGCCATTCTTTCTTT
TAGAAATACAATTTCAAGATTCCTTATAAAATATCTGTATTTTGGGTTTAGCATGGTGGCTCACACCTGTAATCCCAGCACTTTGGGAAGATGAGGT
GGAAGGATGCCTATGCAACATAGTGAGACCCTGCCTCTGCAAAAAATAATAATTAAAAAAATTAGCCAGGCATGGTGGTGAACACCTGTAGGCCGAG
GGCCCAGCTACTCTAGAGGCTGAGATAGGAGGACCCTAGAACTCAGGAGTTCGATGCTGCGGTGAGCTATCATCGTGCCACTGTACTCTAGCCTGGG
CAGCAGAGCAGGACTCTGATTCCAAAAAGAAAGCTAATAAACCAGACATGTATTTTGACTTTTCGTTCTCTTCATTCTTTCCCACCAGGCTTGGGCA
CTGTTTAAAGGAAAGTTCCGAGAAGGCATCGACAAGCCGGACCCTCCCACCTGGAAGACGCGCCTGCGGTGCGCTTTGAACAAGAGCAATGACTTTG
AGGAACTGGTTGAGCGGAGCCAGCTGGACATCTCAGACCCGTACAAAGTGTACAGGATTGTTCCTGAGGGAGCCAAAAAAGGTAGGGGCTCTCCTGA
ATTTGGGTCACCTAACAGAGGCAGCCAGATCCTTGAGGCACCTTAACTTCATTCTGAGCATCACTTTCTAGCTTTCCTTTTGTATTGCCTGCCTGCC
TGCCTTCTGCCTCACAGTGAAGCCCAGCCTCCTTGCCTGAGTTATGTGGGTCACAAGTTGAAATTCCTGTGGGGTTCAGCATAGGAGAATTAATCAC
ACTGTATGCCTCAATGTATATGGGGGGGGGTGCATTGAATATGTGTTTTCCAGTTAGTCTTTCAAAAAAAAAAAGAAAAAAGAAAACTGGATAACTT
GTTAAAATTTACTTATCTAATAGTCTTTAGTGAGTGACTATTTTGCAGAAAAGGAGTAATGAGAGGAATATCTCATCACTATGCATGGTAATAAAAC
TGTCAACTTTTAAAGTGTAACATGGTCAGCTGAGGTGTTTATTAAAAGTCAGATTCCTGGACCCCTCTTTTCAAGATTCTGACCAGTGTGTCTGGAA
GAGAGCTCAGGAATCTGCATCTGGAACAAATCCTTCAGGTGACCTCACTTGGGAAACATCTGGCTGGCGGGGTCCTTTATGTCACAAGGCACATTCG
CATGCCATCTGTCATGTATTTCTTTACCTGTCCTGTACAACTCAGACCTTGTAGAAAAAAATCAGTTTAATAGCATGAAAAAATAACTTCCCAAGGG
AGTTGCTGAAAAATACCTTATTTGTCAACACCGTGTTATGCATTCTAAGAATTAAATGCTCAGGTATTTTTACAAGATTTGACATTTAGTTAGGTCA
GTTCCTGTTTTTACGTTGTGCCATTTCCCTTTTCCCCAAACATGTAGGAGCCAAGCAGCTCACCCTGGAGGACCCGCAGATGTCCATGAGCCACCCC
TACACCATGACAACGCCTTACCCTTCGCTCCCAGCCCAGGTATGGTGGAGGGCACTGGGCTCCCTGAGGGCGAGGCTGTGTGGGCCAGCTGCCCACA
TGGCCAGAGAACCACAGCAGCCCAGACAGCAGAACTTGCCATTTGCTATGGCTGCTCCAACAGCCCAGAAAAACCCCAGGTCACTGAACGAATGTCT
CACTTTCCACACGGTGCTGCCATTGGTGTGGATTTTAAGTTGGGGAGGGTCGGGCGTGTCCGCCTGTTGGAATATGCTTCTCAGGTCTTCTGGGAAA
CAGATGTTTTGTGGAAGTGGAAGATTTTGGAAGTAGTGCCTTATCATGTGAAACCACAGGGCAGCTGATCTCTTCAGGCTTTCTTGATGTGAATGAC
AGCTTTGTTTCATCCACTTTGGTGGGTAAAAGAAGGCAAATTCCCCTGTGGTACTTTTGGTGCCAGGTTTAGCCATATGACGAAGCTTTACATAAAA
CAGTACAAGTATCTCCATTGTCCTTTATGATCCTCCATGAGTGTTTTCACTTAGTCTGATGAAGGGTTCACTCCAGTCTTTTCGGATGATAAAATGC
TTCGGCTGTCAGTCTAATAAGGGATTCCCTGAGGAGTTTGGAGGCTGTAAGAGCACCCCCCGTCTCAATGCCAGTGCTTCTTATCTCAGCCTCTCCT
GCACTCCTTTACCCCCGTCTCGATGCCAGTGCTTCTTATCTCAGCCTCTCCTGCACTCCTTTACCCCCGTCTCAATGCCAGTGCTTCCTATCTCAGC
CTCTCCTGCACTCCTTTACCCCCGTCTCGATGCCAGTGCTTCTTATCTCAGCCTCTCCTGCACTCCTTTACCCCCGTCTCAATGCCAGTGCTTCCTA
TCTCAGCCTCTCCTGCACTCCTTTACCCCCGTCTCAATGCCAGTGCTTCCTATCTCAGCCTCTCCTGCACTCCTTTACCCCCGTCTCGATGCCAGTG
CTTCTTATCTCAGCCTCTCCTGCACTCCTTTACCCCCGTCTCGATGCCAGTGCTTCTTATCTCAGCCTCTCCTGCACTCCTTTACCCCCGTCTCAAT
GCCAGTGCTTCCTATCTCAGCCTCCCCGTCTCAATGCCAGTGCTTCTTATCTCAGCCTCTCCTGCACTCCTTTAGCAGGTTCACAACTACATGATGC
CACCCCTCGACCGAAGCTGGAGGGACTACGTCCCGGATCAGCCACACCCGGAAATCCCGTACCAATGTCCCATGACGTTTGGACCCCGCGGCCACCA
CTGGCAAGGCCCAGCTTGTGAAAATGGTAAGGAGGATACCAGTGCAGGAAATAGAAGAGCTAACTGCTAATGTGGCCATGGGCCATGGCGAATCCTG
GTCTGTCCTGGGCAGCACCAAAGCTCTTTCCCCTTCTTAGAGGCTGCGTGTGCAGCTCGGGGAGAGGGGGGTTTTCTCACTCCTGTGGGATGGTGGC
ATCCCACAGCCAAGTTTACTCTCAGGATCCATGCTAGGCACTGCCCTTCGTGGGATCTTATTTAAACACCACAGAGATCACTCCAGGCAGTGGAAAA
CAGCCCCCCACTTTTTATATAGAGAGGAGATTGTGGAAGCTCATAAATAATAAGTAGGGATGCTGGGAGATTATTGAGCTGGTATATTTCTCTCGAA
TAGTGGTGTGTTCATTGTTGCTATTGTTGGAATTAGAGGTGATACTAAAAAAGGAACGGAAAAATACCATGGCAAACACATAAAACGTCTCTACAGG
TGCCTACCTACCACTGGGTCCCAGAAAGACTTGCTGATTGTGGATTAGATGTGGTCCCCTGCCCTCGGGAGTTCCCCAGACATCAAAATGAGCTCCC
TCAGCAGAAGCTCTCATTAGCTGGGTGCAGGGAGAATCTAGCAATGCGGTAACTCAGGCCTTCAGGACTTTTGAGTTAGTTACTTAAATGGAAGTCC
TGAGACAGGTCAACACACTGAACCCTTTGGATGTTTTAGGAATATTTGTTCCTTTGCAATTTGGCCTTTTTTTCCCCAGTCATGTTCAGGTTATCCT
TGGCTGCAGGTAGTGAAGAGGTGTACCACTCTTTAATGTTTGTACTGAGTGGCATGTTCACAAAAAAGCTCAGAATTCAGTTGCATTGGCTTTTCAA
GAGGGATTTGCAGCAAGGGCTGGTTTCCAATATGGTAGTGGAGGAATTGGCTAACATAAAACTAGCTCCTGAAATTCAGACTTGCGTTTACTGCTCT
GGCTCTATGGAATTAGTAACCATGGGAAAGAGGCAATGCTTAGAATTGTGTAAAGTGATGGAGTAGGTAGAGACCTGTCTTGAAGCATCGGTAACAG
TAAATGAAGCAGCAGCAAGATCAGGTGTTCTGTGCCACATTCTTTTTCCATTCATGTTTCATACAACATTGTCTTCAGGAACATGGTTCAGTGTTCT
CCCAACCCACAAGAGACAAGCAAAATAAAAATGGACTAAATAATTTGCTAGTTTTTAATTGGGCTCTTTGGCACAGACTCAAGTAGACCTGAACTCT
CAGCTCTGTTGTGAACCCGCTTTGTGAACAAGGACAAAGCATGTCATCTGTCTCTGAGCCTCAGTCTCCCTGTTAGTCAGTTACAGAGAGAGCGCTC
CAAGTTTCCTTCCAAAGCTGTGCACTGGCTCGTTTCTCCATCAGCTTTGGTTTTCCAGTTGGTCTCCAGCTCATCTTTGCCTCACAAGAGCGTGCCC
TGCTAGTTGCTGGTGCTGGGAGTGGGTGGGAAGGTGATTGGGCGCCAGCCCCTTCCTTCCCAGGCTTCACACACACACCCCAGGAAGCCCCGCGGTG
CGTCGGACTCTCTGTCTAGACATCATCTGATTTTTATTTGCAAATGCAGGTTGCCAGGTGACAGGAACCTTTTATGCTTGTGCCCCACCTGAGTCCC
AGGCTCCCGGAGTCCCCACAGAGCCAAGCATAAGGTCTGCCGAAGCCTTGGCGTTCTCAGGTGAGTGCAGGGTTTGCTCCTGGAGGCACCGCAGGAG
GCCAGCCTCTGCTGCCAGCTCTGTCATCTTTGGGCAGATTCGATGGGACTTTAGACACTTGCTTTGCTCCCTCTGGGGTCTGGAGTAGATGTAGACA
CATCCTGTGTGTGAGGTGACCAGGGTGATTTAGGAGCACCATTAGAAAACCTGACATCACTGCTTGTGGTTCTGCTGACCGTTTCAGCCACTGGCTT
GAATGGAGTCATTTTGGCTTCTTCACTGGCACCTCTCTGAATTTCTAGGAATGTGCCTTTACCTTTACCGAGGGCCCCTCTTCAGCCAACATTCTCA
CGATGTGGAATAATTGCTTGGAAGTGTAGAAGGGCTTCTCATTTTGAGAAGCTGATCATCCTTCCAGGTTGAGCCACAAATAAGTCCTCCTCCTCTA
CTCCCTGGGGACATTAGTTCTGGTCCCTCATCTCTAAAACATTGATGTGCCTAAGAGTAATACACATTTTGGTCTTCCTCTGAACTTTAATATAGCT
TGCAAACAAATATGGATTCAATCTGATTTTTAAAGTTTTATTTCTAAAAAAAAAAAAAAAAATCCCTGCACCATGGAGATCTTACCTACTATAAAGA
AGGCACCTCTAGGCTTGGCAAGCACACGTGCTATATGTATATTTATTTTTCAGATAATATTTTGGATTGTTTTTAAATGGGATTTGTTTTTATATTA
AAACCAAATAGCTTAAGGTTTGGAATTCTCATCTTGCCCTCTGGCATCTTTAAAAATCAGTGATGAAAAATACTAACTAAATTCTGAAGGTTTCAGG
GAGGCGAGAGTTGTGGCACTTTTGCTGCTCAGAGGGGAGCTGGAGTTTGACCTACCAGCTCTTTCTAGTTCTGAATGAGGCTTGCACCTTTTTTTCT
GAGGTGCTCGTGAGTAACTGAGGATGCCCTTTGGGAGGAGGTGCTTCTGAGCAGGAAGGCTTGTGTTTGTTTTTAGAAACTTTCAAACCCTTGTCTT
GAACACCTAAGACTTGTGTGGGTGCCTGAAGAGTAGGAAATAAACAGCTATTTATATCTCGGCAACCTCGTGATTTCTGATGACATTAAATGAAATG
AAACCTGCCCCGAGAATCACCTCGAATGGCCAACACCCACTCTCTTTGGGGCGCACTGTCTGACTCGCTTTCAGACAGTGTGTTGAAGCAGAGAATT
GAGACAGTGATGTGGGTTAAGTCTCAAAAGGTGCTGTTGAGGAATAAGATAGTTTTGTGGGTTTCTTTTTTTGGTATGCATGATACAGATTAATTAT
CAGCCATGAGCACATTTATTAGATAACTGTGATTCCCATTGATTTTGGGGTTCCATACAGTTACCAGTGGCAGCTGCCTCCTGTCTGTGCCACTCCC
CTGCGGTCTGGCTGAGGAGCTTGTGCAAACCCAGCTTGGTTCTTTCAACTCATGGGCGATATTTTAAAGAGGCTTCTGAAATCAGCAAAACGTTTGT
AAATGGATTCATCTTGTTTAAAGTTTCAGAGAGCGCAGTTTTAGAGTTCTTTTCAAACTTAAACACAAAGCCCAGTGGGAATTTCAGCAGACTTTAC
ATGAACTTTTAGAGTATTTTTCTCATTAATTTCTTTCTTTTCACAAGAATTAATTTTGTGATAAAAACACCACATATCCAGTGTGGAAAACTAATTT
AAAAATCAGAAAAACAAAAATGGAAAATAAAAACATCACATTCTACCACCCAGAAATCACCATTAAGGCCTCAGTGCTTACCCTTTAATGTGTGTAT
GTGAGTGTGTTTATATATAAATTATATAGACATAAATAATTAAGCACCTAATTCTATATATAATTTATATATGTACACACACACACACACACACACA
TTTGCTTTTTACCTAAATGATGTCATGTTATTATTTTGGGGACGTTTCAGGTATGTGGACCGACTTGCTTCTTTCTGAAACACCGTTATATTTTTTG
CTAGTATAAATTAAACTTAGGGTTCATTTCCTCCAAAGTAAAAATTGATTTGCTTAAAGATGAATTTTCATTCAGTGACACATGACTTAAATGACAT
CACCACTATCATCATCATAATTCACAAATAAGACTTAGCAAGTTCTTAATAGTGATGCTCTATAATAGGAATTCAACTTACATTTCCAGAAAATTAA
TGAAAGATACACTTGTTCCTTAAAAAAAGAGTCGGTGGCCACATACGTTTGTAATATGCTGGTTTAGACAGATTAAATGGGTTTCTTTCCACGGGAC
TTCTCCAAGTGTTGACCGAGCTCATGCTGTCTGTGGATCTCTGGGGGAGACAAGGGCACGCTGTGTTTCCCAGGCCTCCTTGACGCGGGAACCTTTT
GTTCCCCCAGCCCACATGTGGGACACTAGAGTTCCACCACAGGTGCTTGGCTCTGTGGAGTCGTTGGCCTCGAGGTGGTGTCCTTGGCCCCCAGCAC
TGACTCCGGAGCTCTGTGTTTGCAGACTGCCGGCTGCACATCTGCCTGTACTACCGGGAAATCCTCGTGAAGGAGCTGACCACGTCCAGCCCCGAGG
GCTGCCGGATCTCCCATGGACATACGTATGACGCCAGCAACCTGGACCAGGTCCTGTTCCCCTACCCAGAGGACAATGGCCAGAGGAAAAACATTGA
GAAGCTGCTGAGCCACCTGGAGAGGGGCGTGGTCCTCTGGATGGCCCCCGACGGGCTCTATGCGAAAAGACTGTGCCAGAGCAGGATCTACTGGGAC
GGGCCCCTGGCGCTGTGCAACGACCGGCCCAACAAACTGGAGAGAGACCAGACCTGCAAGCTCTTTGACACACAGCAGTTCTTGTCAGGTAAGGCAC
CTCGTTATCTGTTAGAATGGAGGTGGTGATGGCCTGCCTGCCACAGGGGTCAGAAACCACAGGGTCCCTCCCACCCCAGGCTGAGGTCTTCCTCCTG
TTGACTTCGGCGCCCACTGGGCTTGGGGCTTGACTCCAGTAGAGATCTTCTGTCTGGCTCTGTTGTGGGCAGAGAGTCCGGATCAGATGGTCCAGGT
GGACCATGGCTCAGGCTGTTCTCTTGCAATTCTGGTTTTCAGCAGTCGCCTCTTAAAACAGTTCCATTTCATTGCACTATGATCTCGACAAATACGT
CTGCTGATGTGGCGGCTCTTTTCAGGTTCCCAGAAAAATCATAAAGGTTGGAAGCATATTGTTAACATTCTTGGTTGTCAGGTGTGTCACCCTCATG
CAGATGCTGGCCCACGAGTGAGACGGAGGGTGGAGTGGACTGTACTGGTTTTGCACAGGAGAAGTTATAGGAGAGTGCTATAAGTTGGCTCTGTGAT
ATGAACATTTCTAAGCATATTTTTCAGAACCAGTGAGTTTTGTTTTTCTACCTTGGATTTCATGACAATTCAGCGAACCTCTGGCTGGCTTCTGTGA
AGCCCCTCGCCCTGTCATGCTGGGCTTCCTCACTGGCTTTGTGGGGCTGTCCAGGTGGAGGGAGCCTCCCGCGTGGGAGGGAGCTGCTCTACCCGCC
ACTCGCCACCCCACCGCCAACTCTTCCTCTGCCTTTTCCCAGTCCTGTCCCTTCCTGAGCCCCTTCAGAAACTCCTGTGTCTTTGATTTCTCATGTG
CCTCCCCTTTTCTTGAATGTGCTTCTTCATTCAACTTATTTAAAATAAAAATATGACACGTCTGTGTGCTCTGGCACTGTTGACATGTGCTCGTACT
TCTGGGTGTAAGTGACCCAAGTTTTTGTAAGCTCATCCAGATTTTCTTTTGGTGCCCAAAGCAAATATGTCCCCAGATAACTAAGCTTCAGGCCAGG
TGTGGTGGCCCATGCCTGTAATCCCAGCACTTTAGGAGGCTGAGGTGGGCAGATCACTTGAGGCCAGGAGTTCAAGACCAGCCTGGCCAACATGGCA
AAACCCCGTCTCTACTAAAGATACAAAAATTAGCTGGGCGTGATGGTGGGCGCCTGTAATCCCAGCTACTCAGGAGGATGAGGCACAAGAATCGCTT
GAACCTGTGGGAGGCGGAGGTTGCAGTGAGCTGAGATCGCACCACGGTGCTGCAGTTTGCAGGACAGAGCGAGACTCCATTGCCCCCCGCACCACAA
AAAAATAACTAAGCTCACACAGAGGCTGACCATAGGAAGAGGGAGAACTGTGCTGGTTCCCCGAGGCGGCGGCAAGTGAGGAAGTCACCTGGGGCTG
GACACCTCTCATTCTAAGGGCAGAACCATCCCCAAGCCCTGGCCAGGGCGGTCCCATCCTTCTTGGGGTTGGGCATGGTGTTCATGGGGGACCAAGG
AAATTGAAGGGCAACTGGGGGGACCCCCCCTCCCCTGTCAGCATCTCCTGTGTCTGCCTTGGGATCTGGAAGAGCTCACATGGGCCAGGAAGGCTAA
GGCCCACTGGGCCTGGATTTCTGAAGACTCTGGACCTTGGTGCCAGTGGATTCAGAAGATACCACAAGGTGAGGGCTTTCTAATGAAAGTGTCACAA
GGAACTGGCACTGGCTTTTCTGAGTGCCTCTTGCTGGGCGTTTTTAGGGAGGTAGAGCCCCCGTGGTGACTAAGCTGGAAGGTGCACATTGAGTCAC
AGGTGCACTGCGTGAGAGACAGCACAGGCAGGGGGTGGACGCCTGTGAGTGTCCTGGGGCTGTAGACTTGCACGACTAGAACTTACTATTAATCTGT
GAGCAAGAGCTGGTCTTGGCTTTCATTCCTTCCTCTGTAACCAAGGGCTGTGCTCTTTGCCCACTGCAGCCTCTCACCTCAAAGTGTTCACTGAGGT
TCAAGGAGGATGCTGTGAACGTAAAAACTGCAGCTGTGCCAACCAGCTTCTGCATAATTAAGGATTCCCACCAAACACTCTCATGTTATCTAGGGTT
GGAGCCATGCTTTCTCAGAGAATTGTGCCAACTCGCCATTCTGATTAGCCTGTGTAGGTGTAGTCTCAGATCACGGCAGTGTGAATGTATTTTACAG
ATTCTGACTAAGTCATTTGGGTTTGATTTGAATTCTGGAAAAAAAAAAAAGCAGGAAGTCAAATAGTCCTGTAAGTTAGCTAGAAACTTCTGTTCAG
TTGAAGAGAACAGTGGAGATCTTTGATATCTTCCTATTCAGGTCTGCACAGCACTAGGGACAGCCCCCAGGGCCCGGCCCGAGGGTGTGTATCTGAT
AAGGACGCGTCTGTTCTGCAGAAGCTGTAGCGGCTCCTGTGTCAACTCGTTTCTTTTGCGGGCGTGACATTTTATTGTAGCTACAGGCAGAAGATTT
GTCTTGTGTACAGGGGAGGGAGCATGGGCTAAAGTCAGGGGATGGGCACTTGTCTTTCCAACAATGTTCCAGTCCGTTTTGTATCTTTTGGGTAGGT
GTGGTGGCTTCAGGATGTACATGTGTATATCCACAAGCGGGAGGCCAGGGGGGCTGCCCCACTCCTGTTCTCAAGTCAAGTTACTGTTCCATCCCTG
GAGACAGGCAAGAAGTCTACTCAGAGTTACACAGTTCAGGCATAGTGACAGTGGGACTCAGCTGCCGATGGCTGGTGCTCAGTCACCACGTTGACGT
TACATATTTTCTGTGGTGCCTGAGTTACGTGGATGTCCGCAGTAGCACAGATACTGGATTATGTGGGCTCTGTAGTGAGGGGATGAGGTTTTAAAAT
GATCCTGGGATGTCGAAACATTCTGATTTTTTAAATGAAAACTTGTCCATGGCATAAATTGGTCTTTTGCCATTGCGTGACTACGTTTCTTGTTCTT
TATCTCCCGACTTCACTGTGGTCTACTACCTTTTGAATCTTCGTGGGTCCAATGCTGCAAAGCAGTGTTCTTTAGCTGTCGACTAGTTCCTCTTGAA
GAATCGAGGGAGACCGAGGGCCCTGGGGGGAAAGCACCCAAAGGAATGCATACATGCTATTTTGTATCTGAGATGTTCACATCAAGAGCCCCACTCA
GCGGAGTAAGAGTGCTCATTCCTCTTGCAGTGTTCAGAATCACAGTAAGCTCTTGCTTCCTGTTTAACCTGGTGTGTTCGGTGATGAGGGTTTCTGA
ACATGGTCTCTTTCTTGTGGGCTTCTACAGAGCTGCAAGCGTTTGCTCACCACGGCCGCTCCCTGCCAAGATTCCAGGTGACTCTATGCTTTGGAGA
GGAGTTTCCAGACCCTCAGAGGCAAAGAAAGCTCATCACAGCTCACGTGAGTCCTCAGTTACACTCCTACCATAGTGGCTTCCTGTTCTTTGTAAAG
GCCAGAGTTTCATTTAGAAAAGTCCCAAATGAAAAGTAAATGTCAAATGACCTGGAAAAATAAGCGTAACCCTTAAACTAGTGAGGGAGGAAGCATG
GTCCAACGAGCAGCACAGTCTGAGGACTCACGTGCTCCTCCCAGACTTGAGATCTGCTCATCAAAGAACCAGGGAGGACAGCCTCAAAGGAGGGTGC
CTCTTTCCCCATCTTTTTTATTTTTCAGGAAAGTTGTCGTATTTCCATTTTATAGGGATTGAAAAAGATTGATGGTTAAAGTTGCCCTTTAAAATTC
TCCAGGTTAAGATTGCTGTAAGAATGCTATCTAGCTAGTGGATCTTCATTCAATGGAAAAGCTTTTCCCAAATGAGAAACTATCCATTCCCTGGAGG
CATTTTGTAGGTCTCTGCAGCTGTGTCCTAGCACCTCTTTTATTTCTGGAATTTTAGAAATTATTTAATTATTGGGCATATGATATTTGAAAGAGGC
TGAATCTTTCAAGGAATTCAAGCAAATCAGACCCTCTCGTAATGTTCTCTAGCATAGCTCAAGATGGGTTCAACTGTGGCAAGTAACACTAAAAGGG
TAGGGTTAGGATTAGGGTTAGAGTTTTCTTTTTTATGAGAAAAGGTTTCCATAGATAACATGAAGCATTAATTTGCCATGGGAAACAGAATCTTGAA
CCCTTAAGACTTTTGAATTTGAAAACTTCACATTGCTACATACTTGCAAGCATTATTAACGGGCTTGCATGCTGAGCAATACCAGGTAAAAGTTACA
CCCCCTAACATCAAAGTTCTCATCATGTTCTAGCTCTGATGCTATTTCTCATTGAGAACTGAAATGAAACATGGTTTAATCTTGAACATACAACCCC
CCTTCTTGATTTTAAAAACAAAGACCAGCCAACCAACCAGTATATAATCCCATAGACTCAGGAGTTTTCTCATGAGTTCTCTCCAGTGATTGACTTA
ATAATTGATATGATTGTTGAAATAATAACTGATACATTGTTAACAACAGGAATTGCTAAATGACTAAATAAACTTGGCATTGATAAGCAGCATTTAA
GAAGTTGATGATCGGCCGGGCACAGTGGCTCACGCCTGTAATCCCGGCACTTTGGGAGGCTGAGGCGGGCAGATCATGTGGTCAGGAGTTCGAGACC
AGCCTGACCAACATGGTGAAACCCCCTCTCTACTAAAAATACAAAAATTAGCCGGGCGTGGTGGTGCGCACCTGTAATCCCAGCTACTCGGGAGGCT
GAAGCAAGGGAGTCACTTGAACCCAGGAGTCAGAGCTTGCAGTGAGCCGAGATTGCACCACTGCACTCCAGCCTGGGTGACAGAGTGAGACTCTGTC
TCAAAAAAAAAACAAAAAAAGAAGTTGATGATCAGCTCAGCTATCACATCAATCCAGTTTTAAAGTTGACATGGATGCAAGTCACTGTCCTCTAAGT
CAGGGAAAGATGGATCCCCAGATGACCCCCTCATGCTGAAGACGAGGCTGCGTGGTCCATAAAATGAATAAACACACGTGTACACCTATGAGTTCCA
CTTTTAAAAATTATTAATTTAATTCATTTCAGGTACTTAGGAGTTTAGCTTAAGTCGTCATATATAAAATACAGTCTCTAATATCATGATTGATGGA
GAGCATTCAGCTTGCCTTAGATGCTGTAAATTCAGGAAAAGCTGAACATTAAGGCGTTTTTGTTTTTTGGTGAGTGTGATCCACGCTAATAACCAGA
CAGTATAAATTTGAGGCCAGTTAGCTTCTCTTTTTCCACAATAGTAGTTTTGTTGTTGTTTAACTTTACTTTTTATTTCTTTTACCTCTGGTTGAGA
ACTATACAGATTACCTAGAAATCAAATCATTCAGGATGAGCTCCTTGTTTCTTTCAAACTGCAGTTGTGGAAAAACAAAATCATTGGCCTAAATTAC
CCTGCAGATTCCCTCAGACTTCCTTTTAATTTGATCACTTTACTTGATTTGATGCAGTTTTAGTTAAATGTACATTTTAAGTGGCAGTCGATTTGAA
AGTAACATCTTTAACCCAGAATTAAGTCACTTTGGCTGTTTTTTTACATGTTGATCTATGGAAGGACTAACCAAAAAATTGCTTCTTTAGATGGCTC
CAAATATGAAATGTTTTGATGTGTTCTAGGATGTAACTTTGGGCTTTACGTTACTGTCTCCTTAGAATCTGAGTGCTGTTTAATAGTGAGCCAGTTG
CAGGATATCTCAGTAATGTCTTTTTAAAATCTCTTATTAAAGGTAGAACCTCTGCTAGCCAGACAACTATATTATTTTGCTCAACAAAACAGTGGAC
ATTTCCTGAGGGGCTACGATTTACCAGAACACATCAGCAATCCAGAAGATTACCACAGATCTATCCGCCATTCCTCTATTCAAGAATGAAAAATGTC
AAGATGAGTGGTTTTGTTTTTGGTTTTTTTTTTTTTTTTTTTGATACGGGGATACGGGGTCTTGCTCTGTCTCCCAGGCTGGAGTGCAGTGACACAA
TCTCAGCTCACTGTGACCTCCGCCTCCTGGGTTCAAGAGACTCTCCTGCCTCAGCCTCCCTGGTAGCTGGGATTACAGGTGTGAGCCACTGCACCCA
CCCAAGACAAGTGATTTTCATTGTAAATATTTGACTTTAGTGAAAGCGTCCAATTGACTGCCCTCTTACTGTTTTGAGGAACTCAGAAGTGGAGATT
TCAGTTCAGCGGTTGAGGAGAATTGCGGCGAGACAAGCATGGAAAATCAGTGACATCTGATTGGCAGATGAGCTTATTTCAAAAGGAAGGGTGGCTT
TGCATTTCTTGTGTTCTATAGACTGCCATCATTGATGATCACTGTGAAAATTGACCAAGTGATGTGTTTACATTTACTGAAATGCGCTCTTTAATTT
GTTGTAGATTAGGTCTTGCTGGAAGACAGAGAAAACTTGCCTTTCAGTATTGACACTGACTAGAGTGATGACTGCTTGTAGGTATGTCTGTGCCATT
TCTCAGGGAAGTAAGATGTAAATTGAAGAAGCCTCACACGTAAAAGAAATGTATTAACGTATGTAGGAGCTGCAGTTCTTGTGGAAGACACTTGCTG
AGTGAAGGAAATGAATCTTTGACTGAAGCCGTGCCTGTAGCCTTGGGGAGGCCCATCCCCCACCTGCCAGCGGTTTCCTGGTGTGGGTCCCTCTGCC
CCACCCTCCTTCCCATTGGCTTTCTCTCCTTGGCCTTTCCTGGAAGCCAGTTAGTAAACTTCCTATTTTCTTGAGTCAAAAAACATGAGCGCTACTC
TTGGATGGGACATTTTTGTCTGTCCTACAATCTAGTAATGTCTAAGTAATGGTTAAGTTTTCTTGTTTCTGCATCTTTTTGACCCTCATTCTTTAGA
GATGCTAAAATTCTTCGCATAAAGAAGAAGAAATTAAGGAACATAAATCTTAATACTTGAACTGTTGCCCTTCTGTCCAAGTACTTAACTATCTGTT
CCCTTCCTCTGTGCCACGCTCCTTTGTTTGTTTGGCTGTCCAGCGATCAGCCATGGCGACACTAAAGGAGGAGGAGCCGGGGACTCCCAGGCTGGAG
AGCACTGCCAGGACCCACCACTGGAAGCAGGATGGAGCTGACTACGGAACTGCACACTCAGTGGGCTGTTTCTGCTTATTTCATCTGTTCTATGCTT
CCTCGTGCCAATTATAGTTTGACAGGGCCTTAAAATTACTTGGCTTTTTCCAAATGCTTCTATTTATAGAATCCCAAAGACCTCCACTTGCTTAAGT
ATACCTATCACTTACATTTTTGTGGTTTTGAGAAAGTACAGCAGTAGACTGGGGCGTCACCTCCAGGCCGTTTCTCATACTACAGGATATTTACTAT
TACTCCCAGGATCAGCAGAAGATTGCGTAGCTCTCAAATGTGTGTTCCTGCTTTTCTAATGGATATTTTAAATTCATTCAACAAGCACCTAGTAAGT
GCCTGCTGTATCCCTACATTACACAGTTCAGCCTTTATCAAGCTTAGTGAGCAGTGAGCACTGAAACATTATTTTTTAATGTTTAAAAAGTTTCTAA
TATTAAAGTCAGAATATTAATACAATTAATATTAATATTAACTACAGAAAAGACAAACAGTAGAGAACAGCAAAAAAATAAAAAGGATCTCCTTTTT
TCCCAGCCCAAATTCTCCTCTCTAAAAGTGTCCACAAGAAGGGGTGTTTATTCTTCCAACACATTTCACTTTTCTGTAAATATACATAAACTTAAAA
AGAAAACCTCATGGAGTCATCTTGCACACACTTTCATGCAGTGCTCTTTGTAGCTAACAGTGAAGATTTACCTCGTTCTGCTCAGAGGCCTTGCTGT
GGAGCTCCACTGCCATGTACCCAGTAGGGTTTGACATTTCATTAGCCATGCAACATGGATATGTATTGGGCAGCAGACTGTGTTTCGTGAACTGCAG
TGATGTATACATCTTATAGATGCAAAGTATTTTGGGGTATATTATCCTAAGGGAAGATAAAGATGATATTAAGAACTGCTGTTTCACGGGGCCCTTA
CCTGTGACCCTCTTTGCTGAAGAATATTTAACCCCACACAGCACTTCAAAGAAGCTGTCTTGGAAGTCTGTCTCAGGAGCACCCTGTCTTCTTAATT
CTCCAAGCGGATGCTCCATTTCAATTGCTTTGTGACTTCTTCTTCTTTGTTTTTTTAAATATTATGCTGCTTTAACAGTGGAGCTGAATTTTCTGGA
AAATGCTTCTTGGCTGGGGCCACTACCTCCTTTCCTATCTTTACATCTATGTGTATGTTGACTTTTTAAAATTCTGAGTGATCCAGGGTATGACCTA
GGGAATGAACTAGCTATGAAATACTCAGGGTTAGGAATCCTAGCACTTGTCTCAGGACTCTGAAAAGGAACGGCTTCCTCATTCCTTGTCTTGATAA
AGTGGAATTGGCAAACTAGAATTTAGTTTGTACTCAGTGGACAGTGCTGTTGAAGATTTGAGGACTTGTTAAAGAGCACTGGGTCATATGGAAAAAA
TGTATGTGTCTCCCAGGTGCATTTCTTGGTTTATGTCTTGTTCTTGAGATTTTGTATATTTAGGAAAACCTCAAGCAGTAATTAATATCTCCTGGAA
CACTATAGAGAACCAAGTGACCGACTCATTTACAACTGAAACCTAGGAAGCCCCTGAGTCCTGAGCGAAAACAGGAGAGTTAGTCGCCCTACAGAAA
ACCCAGCTAGACTATTGGGTATGAACTAAAAAGAGACTGTGCCATGGTGAGAAAAATGTAAAATCCTACAGTGAAATGAGCAGCCCTTACAGTATTG
TTACCACCAAGGGCAGGTAGGTATTAGTGTTTGAAAAAGCTGGTCTTTGAGCGAGGGCATAAATACAGCTAGCCCCAGGGGTGGAACAACTCTGGGA
GTCTTGGGTACTCGCACCTCTTGGCTTTGTTGATGCTCCGCCAGGAAGGCCACTTGTGTGTGCGTGTCAGTTACTTTTTTAGTAACAATTCAGATCC
AGTGTAAACTTCCGTTCATTGCTCTCCAGTCACATGCCCCCACTTCCCCACAGGTGAAAGTTTTTCTGAAAGTGTTGGGATTGGTTAAGGTCTTTAT
TTGTATTACGTATCTCCCGAAGTCCTCTGTGGCCAGCTGCATCTGTCTGAATGGTGCGTGAAGGCTCTCAGACCTTACACACCATTTTGTAAGTTAT
GTTTTACATGCCCCGTTTTTGAGACTGATCTCGATGCAGGTGGATCTCCTTGAGATCCTGATAGCCTGTTACAGGAATGAAGTAAAGGTCAGTTTTT
TTTTGTATTGATTTTCACAGCTTTGAGGAACATGCATAAGAAATGTAGCTGAAGTAGAGGGGACGTGAGAGAAGGGCCAGGCCGGCAGGCCAACCCT
CCTCCAATGGAAATTCCCGTGTTGCTTCAAACTGAGACAGATGGGACTTAACAGGCAATGGGGTCCACTTCCCCCTCTTCAGCATCCCCCGTACCCC
ACTTTCTGCTGAAAGAACTGCCAGCAGGTAGGACCCCAGAGGCCCCCAAATGAAAGCTTGAATTTCCCCTACTGGCTCTGCGTTTTGCTGAGATCTG
TAGGAAAGGATGCTTCACAAACTGAGGTAGATAATGCTATGCTGTCGTTGGTATACATCATGAATTTTTATGTAAATTGCTCTGCAAAGCAAATTGA
TATGTTTGATAAATTTATGTTTTTAGGTAAATAAAAACTTTTAAAAATTTGTTATGGAATGTGTGTGTGTGTTATTAAACATGCATCCTGATAGCTT
TTAAAGCACTTTCTCCTGCGGTTACGTTCCTTCAGAGAGGCTGCTGTACGTGTCTCTGAAATCAGATCTCCAAGTGTTCACCTTGTTAAAGAGACAA
ACGCTGGCCAAGTGCCGGGCTGCTCCTCCCACACAGAGGAGTGTCTGTGAAGAGTAATCATCCTGCTCTCCCGTTAGCATCTGCCTCCTCTTCCTTT
ATCTGTACTTTAAAAGGTTTAGGGCTTTCAAGGAAGTTGTTTTTAATGTTTTCTTTTGTTTATATTCGAAGCTCCTCTGATTTTGGTCATTGCTAAA
AAGAAGGGATATAGGTTAACTAACACTCCAAATGTGAAAATCAAATGGAAAACTGGATAAAGAGAACAGGATTTAGATGGAACCCCTGGGGATCCGT
ACGTCTGCTGTTGACCTCAGCTCCAAACTCTTCCTCTCTCTGAGCAGCCAGGCAAGGGAGTCTCCTTTCTCAGCTTCATCGCTTCTACTGATTACAT
GGCTCAGCTCCTATGCACCTACTAACTTCCAGTCCAGCAGAAAAACTCAAAGAACCAGGCTGCAGCTGCTGGTGCTAAAATCCTTGCAGCTGAAGGT
TACATAGAGCTGTCAGAAAAGTTTGTAGTTTGGATCTAGAACCCCCCCTAGAATAGTAGATTAGCATAATTTTGATTTTGCTAAATGGTAAAATTTC
TTTTCTAAACCCTCACAAGTTCAGTTGAGAAACTTTCCTGAAAACAAAGATCAATAAATCTTAGCATAGTGATAAGACAAAGGAGACAGCAGCTCCA
GTGTTTTAAAAGGGGACAAAAATGAGAGAAGGTAGTAAAATCTGTTCCCAGATTCCACTGCTGCCTTCGCTGTTCCCAGGAAGGAAGGATTTATGTC
CTGATCTCAGGAGACAGGCTTCAGCAGAGTGCTTCCCTGTGAGTTCTGTGTTCCTAACTTAACAATTCTCAATATTTTGGGGAGAAATATTTTGGTT
TCCTTCAGTCCCCCCTTGAAGCTTTACTTTCAGAAAGTTTCACATGTTAAAAGCTAAGTTGGTAGTTTTGGAGAGATTTGGGTTAGAAGTTTTAAGA
TAAGAGATTTGGCAAAGGAGGAGGAGAACATAGTTTGGAACAAGCAGAAAGGAACCAATTTGGGTACATTGTTCCATCTCTTATTGTATCAGTCTTT
CAGTCCTGAAAATAGGTCAGTTCCGTTAAATCATTGCATCCCATTTCAGAGGTGGTGTAAGTGGGCTTCCATAAGAGTTACGTCTTCCATATGGTGT
AGGCACACAGGTACTTTATCAGAGACATTTGTATGGAAATAAAAAGAAAACAAAGGTCTATGTTTCAAGCAGTCTATAAGCTAGTTTCTGGAGAGCA
ACCAGCTGAGATTTCTAGATTTGGGTTCAAATAATTTTAAGTTGGAGTGGACAGGCAGTGGCAATCTGACAGATTTTTCTGGATTATAGTTTGCATC
AGACGTTCCAGTGAAGTTTTTGTCCATAAATAAATTGTGATGACTTCTCCAAAGTTTATATCAAGTTGTTCAGCTTTCATTTGCAGGGCTTCAGGAA
AGGCACGGTTTTAATTCCTAGTGATTTCAAGTCAGAAAGGTGGGAGAAAGTTGGGAATGTTAGTCTGAAGAGCCATAGCAGATATTAGAGGAAACTA
AAACTTCAGGATTCAGTCCAGATAATTTTTAAAAACTCTAAAACAATGGACAGGGCTAGAATCTAATAACAGCTATGCTATAGCTGTTCTGAAACAT
TTTTTCTCTCTACAGTCACCTCCCTGTTTACCAAAGATAATCACAATAAGTCCAGTTTACTTACAAAACAAGTTTAGTGTCATTATATTTAACCGGA
TCATTTACATAAGTACAGCAAGAACAGTGATTTAACATATAAGCTCTTTTTAAGTCAGCGTTGCTGGAACTTTTCGTAAAGAATTTTATTAGATTAG
AACACTAAAACCCTCTTCAGACTAGGAAGCCGTGCCACAGACTTACCAACAGATTTTATCTGAGATACCTGGGTAAATTTTTTTCTTGAGGTCTCCA
AAATGTTTTGAGGTTCCTGGGCTTGTCAGAAAATGACATTATTTACTTACTGCAAGGCTAGAAGTGCTGGAAGGGCACCGCATAGTTCAGGAACAAA
TCATAGCCTTGATGATATAACCTGTGTTTCCAATTTTTCCAGTCCGAAGAGACCAGATTCCTAGTGAACTTATGCAAATAACTATCTTGCCATAAAA
ATAGAATTTCTCACATACAGTTTCTAAATCCTGGAGGGCTCAGGTAAAGAAAAAGATAAATGTTTCAATATTTGTGCACAAAAATATACTTTACAAA
ATTACTGTAAAGCTGTAGATTACTTAAGAGGGAAAAAAAGTTTTCTCAACTATGGAAAGAAAACATAAAAAGAATCAGCAATGCTTTAAACAAAAAA
TGTTGCAAAAAATCATTTTAGTCCTTCCTTGGTTTAGTTTCGTGTAATTCTTGTTTTGCTTGATTTGGGGTTACTAATTTTATGAGTCCAGTTTTTT
TTTCATTAGCATTCTGGGAATTTTTAATGACTCCAATAATATGGTCTGAAAGTTGTCAGGAACCTGTATTCAAGAGTACTTCTTTCAGTCCTTTCTA
TGAACCTTCTTGAAGACATAACACTTTAGGATCTGCAAAGAGCTTTTAGAAAAAGTATCATAATAAAGCAATTAATAGCAGATAACAAGACTTAAAA
TGGACATAGTTAAAGACACAATTGACATGGAAATTTGGTTACTTTCTGTGGCTTACAACAATTTAACATAATACCCATAATTATAACTGACAACATT
ACCAAAACATATCAGATTTTTAGGAATCTCATACAATTTTAGAACACATATTAATAACATATCCATATGATATAGTTTGGATCTGAGTCCCCACCCA
AATCTCATGTTGAAATGTAATCCCCAATGCCAGAGGAGAGGCCTGGTAGAAGGTGACTGGATCATTGGGGTGGTCCCTCATGAGTGGTTTAGCACCA
TCCTCTCAGTACTGCTCTCATGATGGTGAGTGAGTGCTCTCAAGATCTGGTTATTTAAAAGTGTGTAGCACCTCCCCCACTTCCTCCTTCTGCTCCT
GCCATATAAGATATGCTTGGTTCCCCTTCACCATCCACTATGATTGTATGTTTACTGAGGCCTTCCCAGAAGCCAAGCAGATGCTGCCATGCTTCCT
GTACAGCTGGCAGAACTGTGAGCTAATTAAACCTCTTTTCTTTATAAATTACCCAGTCTCAGGTATTTATTTATGAAGTGCAAGAATGGAGTAATAT
AGAAAATTGGTACCAGTAGTGGGATATTGTGATAAAGATACCTGAAAATGTGGAAGTGGGTTTGGAACTGGATAACAGACAGAGATTGGAAGAGTGT
GGAGGCTCAGAAGAAGACAGGAAGATAAGGGAAAATTTGGAACTCCCGAAGGACTTGCTGAATGATTGTGACCAAAATGCTGATAGTGATATAGACA
ATGAAGGCCAGGCTGAGGAGGTCTCAGATGGAAATGAGGAACTTATTGGGAACTGGAGTAATGGTCGCTTTCGTTACGCATTAGCAAAGAGCCTCTA
CTCTAAAGATTTGTGGAACTTTGAACTTGGGAGCAATGATTTAGGGTATTTGGCAGAAGAAACTTCTAAGCAGTGAAGTGTTTAAGATGTGACCTGG
CTGCTTCTAACAGCTTATGCTTATATGTGTGAACAAAGAAATAACCTGAAACTGGAACTTATATTTAAAATGGAAGCAGAGCATAAAAGTTTGAAAA
ATTTGCAGCCTGGTCATGTGATAAAGAAAGGAAAATTTCACTAGCACCTCTATCTAGGGTCTCAGGTTCTCATCTGACAAAGTACACAAAGGCCTTA
CAACCCCATGTGTCCATAGATAGAAGAATAAAAAAAGACAGTCTGTAAGAGAGGAAATCAAAAGCTGTTCATGGTAGTAGAAAGGATTACCAATGGG
TACCACAAAAAGTCAAGACTCATATAAATAATTAAAAACAAGGCATTTACACTAATTTGTATAAATGTTTCTCTCCCAAGCTAAGGTATTTACTAAG
GAAATCAATTTGGTGGTGGGTCTAAAGAACTTTATTTAACTCTGTGTCAAATCCAATCTCTGCTTGAATGCTGCTTAATTAATTCCCTGAATAACAT
TTCAAAAACATGGTAAGATTAACATCTTCCATGGGCTGAGAAAGGCTTAGAGAATTAGGCTGAAGAGTGTTTTGTCAATCTTGCAATGACTTACAGG
CATTTGAAAAGTGAACTTCTCTAAAAGAAATTTATTTTAAATATAGCCAGTCTAATTTATTTCAAAGTGATGTAAACCAATAAGCCAAAATAAAAAC
ACCAGAGTCACTATATCCAAGAGCCAATTTATACAAATAATTTTCTCCTATTTAAATTTGGAAATGAAGGAAAAAAGAAAAAACTCTTACCCTCCCC
TCTCAACTGAGCACTAAAAATAGAGATGTGAAGAGCTGACGTTGGTAAGAAACCTTACCCTTTTCTGCTGGTTTCTTTCAGATCTCTCAGAGCTCCA
TCCATTGGCCCTAGTGTGAGCAAAGTGTGCCTTTGTGGTTGTCAAATTGAAGGAAAGAAAATATGATTTATTTTCTCAATCCTCATATTTTCTTACC
TGAGACACTTTCCTGAAAAAAAAAAGATTAACAAGAGAAAAGCCAGAAGAAGTTTATTGATGAATATTGTACCCATCACCTAGAAGAAGGCCTCAGT
AGGAGGGGGCAGTTCCAGTCTTTTAAAAACTGGGAAAATGTGGGAAGATAGTAAACCTTGTTCCCAGATTGTTCTGGTGCTTGCTGATGCCTTCTCT
GGGCCAATTTCTAGTAAGGAAGGATTTATGTCCTGACATCAGGCAAATAGAGGTGGGGCAGAGTGTTTCCTTGCATTTTCAGTGTGTTTAACTTAAT
AATCCTCAATATTTTTGGAAGAAGTATTTTGGTTTCCTTCATAACGAAATAGAAATAATGGACAAATAAACAATCTTTCTTCTTCTTGGGGCTCCAT
TTGCTCAACAAATACAGGTGGACTCAAGTCAGTATACATGCATAGGCAAGTTTTTCTTCAAATAATATATCAACTGGTTATATCTAAAAGGGTATTC
CAAAGGGTTTTGAGCCCTTGAGATTGCTCTGAAGTAATTTTATGTATCTCTAAGGTACCAGTGTTTATTCTCGTAAACTGTTCTGTAACTGCAGCAC
AAGTTTGGCTGTATTGGATTTGATTTCCTAAAAACAATGATCACCTGACAAACACGCTTGTTGCAGTGTGCCACCAGTACTCCCCTAGGCCAGAAAG
ACACGTTGGGTCCTGTCTCATCTCTCTGCAAAGGAGCTCTGGACAGGCTATACCTAAATTAACACAGGCAGACATATATTCTCTGTTTTAGTGTAGC
ATTATGAATTATATGGTGTTTGAAGGCAACCCGGCCTTTTCAGTGACCCCTCCTCCTGCCACACTGGTAGTGTGTTGGCAAAATGTCTGTCCTTAGG
GAGTCCTCAAAGACTCCTTCCTTCTCTTCCCTCTGCCCTCTGCCTCTGCTCCCCTGGCTAGTCTGCGCCCACAGGTCTTGGCTGTGGCACACTCCCC
TTCTGCAGGCATTGCTTCCCTTATTCCACCCTCTGTTTGGGTCTCCAAAGTGTGATATTTGTCTTGAGAAACACTTTGCCCCACTATGTCATTCCCC
TTTCCTTACTCTCCAAGCAGCTGGGTCACTGGTGCTCAGGACTCAAACTGGCTGGGAATGTGAGAAAAGCTCCTTTTCCCTCCTGGCCTCCTACTTG
AGACTAAAGCAAAATGCTGAGGGTTGAGGAAGGGAGAGCGAGTGCTCGCTGAGAAAGGAAGAAATGAGTGTTTAGACTTCAGCCACTCCCTGATAAA
GGGGAACGATCTTCTGCCTCCTGGGAAAAACTTTGATGAGACAGCAAACTTGAGAAAAGTTTGTGGGAAGGAGCAGTGAGAACCGCAGGTTACGAAG
GGGCCAGGTGGGCAGGACTGAAGGATAACTCCATGGTAACCGGCGTGGATCGATGACTATGGGGCCAAAGAGTGGGCATGCCTGGGTGTGTCTGAGC
AGAAACTGCATTGAGGACAAGATCCCCTGCCCACCAGCACAGGCTCTGGCTCTGTGGGAGCTATGCCAAACTTAGCCCCAGTTCAAGGGAAGGAGAG
GGAGGAGAGGGAGGAGAGGGAGGAGAGGGATCCAAAGTGAACTGAACTTGAATTTGCATCACCCTAGTGGAATATGAGCTTAAAATTAACAATTATA
TTGTTAAAGAAAATATGAACTACATGTCTTAAAAACTTTGGCTCTGGACTTAGATTTCTACGCACCATGTCCGCAGCATAACACTGCCCATTCTTTA
TTGTAATTGTCTGTTTATTAATTTGTCTTCTGTACTATAAATTCCTTGAGGAAGGGAACTGTGCTTTCCAGTAAACACCCAGTACTGGTGCAGCACC
TGGCTTATAGTCAGCACCATCGAATCCTCAGGAAATGACACAGTTGGCGAACCTAGATGTCTACCATGTCCAACAGTGTCCAATAGGATGCTGGCCA
AGTGATGAGCCACCTATGGCATGAAATGCTATAGAACCACTTACAAATTGTGCAGTATACAAGTATTTCATGGCATGGGGAAATGGTTGTTACTTTG
TAAAGTAAAAAGAAACAGGTTTCAAAACAATGTGATATCTTTTTAAAATTTCATGGAGCTCATACATAGAATTTTTTAAAAAGAACATTCAACAGTG
TAAATTATACCCCTGAGATGTGGGGTCATGGAAATTTTTTATTTTCTTGTGTGCTTTTTTGTACTTTTCAAAGTTTCTCCTGAGACCACATATTTTG
TTACTAGAAAGGGAGAAAAGCACAAATGTAATCTTTCTAAGTTGATACGTCCCTTTATATTTTTTGGTGGGCTTCCAGTTTCTCAAGCTGCCTTGTG
GGGTCCCCAGAGCTCTGGGGGTGGGACCAGCTCTGAGGTGAAGGGACCAGGGGCTCAGGGTCTCAGGGCCCATCTCCCAGTCCTGCCTCCATTAATT
TCTTTTCCTACCATTTCCCCTTGATATGCTTTCCCCCACCTCATCTTTCCCAAGATGCTTCTTTGTCCTCTGAGCTATGACACTGAGGATGAACGCT
CTCTCAGCTTTCTGGCTGCAGCTGCCTCCATGCAGGGACCCCCAGCCTGTGAACTTCCCTCTGGCACCCCCACTCCCCCATGCGGAAACTCCCTCGG
CCACCCGTTCTCATCCCCAACCCAAGCGGGACCTCCCTCCCCCACCAGCACCCCCATGCGGGACCTCTCTCCCCCACCAGCACCCCCATGTGGNNNN
NNNNNNNNNNNNNNNNNNNNNNNNNNNNNNNNNNNNNNNNNNNNNNNNNNNNNNNNNNNNNNNNNNNNNNNNNNNNNNNNNNNNNNNNNNNNNNNNN
NNNNNNNNNNNNNNNNNNNNNNNNNNNNNNNNNNNNCCCCCTCCCACCCCCATGTGGGGATCTCCCTCCATCCCTAGCACCCCCATTGTGGGATCTC
CTTTCCTCACCTCCAACCCCCATGTGAGAACCTCCCTCTCACTCTCACCCCCATTCTGGGACCCTCCTGAGTCTCTGCCCTTCCTCAGTCATCACAG
TCTCTGTACAGCTAGGGACTGACTCTTTGCCTTTGGCCCTGCTGTTTCCCCTCACGCTAATGTCAGCATTTGGGGTTGCCTGGAAACAGGAAGGATA
AGAACATTGATTCTTCTTTTTTATTTGTGGAAAATATGCATAACATAAAATTTACCATCTTAACCATGTTTAGGTATACAGTTCAGTGGCATTAAGT
AATTCACATTGCTGTGCAGCCATATCCAGCATCTGTCTGCAGGACTTTCTCATCTTCCCAAATTGAAACCCTGTCTCCATCCCACACTATCTCCCCA
TTCCCTGGCCCCTTTGCCCCCAGCCCCCACCATTCTACTTTCTATCTCTATGAAACTGACTACTCTGGATACCTTGTATGCGTGGAATCCTGCAGTA
TTTGTCCTTCTGTGTCTGGCTTATTTCACTGAGCTTGATGTCCTCCAGGTTCGTTCATGTTGCAGCACGTGTCAGAATTTCCTTTCTTTCTAAGGCT
AAATCATATTCCATTGCATGGGTGGACCATATTTTGTTCATTTATCTGTCCTGAACACTTGAGTTGCTTCCGTGTTTTAGCTACTGTGAATAACGCT
GTTGTGGACATGGGTGGACAAATGGGTCTTCAAGACCCTGCTTTCAATTCTTTCATGTGTATACCCAGAAGTGGAACTGCTGGAGCGATGAAAATTC
TATAATTAATATTTTAAAGGTACCACTGTACTGTTTACCACAGTGGCTGCATCATTTTACATTCCCACCAGCAATGCACAAGGATTCCAGTTTCCCC
ACATCCTCACCAACACTTGTTATTTTCTGAAGAACATTGATTTTTTTAAAAAGGATTCATTCCACAAACATCTTCTGAAGACTCCCCATGTTCCTGA
CCCTCCCTGCTTTCCAGGGATAGCCAGCTGTAATCGCACAGCTTCTGTGTGGGTGCAGGAGGCCAGCAAGCACTGAGACAGACGCTACGGGCAGGGC
ATTTCCGAGAAGGAAATATTTTCATTCTCCATTTTTAAGGTGAGAAACTGAGGCCCAGGAGTGTAAAGCCAGTACCCTAATATACAACTACTAAAAG
AGGAAGCCAGGATTCAAATCCAGGCCTTTGTGGTTTCATAGCCTTATCTCTTAATTCTGATGCCAGCCTGCCTTCCCTTCCACCATTGACGTACCAA
GAGTCAGAGAGGTGGCACGGTGTACCTGTATCCACACCACTGGTGAGCAGCCCTCCAGCATCACACCCAGACTTTCTAAGATGCTTGGTATCCCACA
GATGGGAGCCAATTTCTTTAGGTGGGGAAAGAGAATGGGAGCAGAGAGAACAGCCTGTTCCACAAAGAAAGGAGAAGAACCAAGAGTTTGGGATTAA
GCATAAAGGTCTAATTAACATTTATTAGGTGCTAAGTGCACTGCCATGTGTCAACTCCTGTAATCCTTGAAGTAATCCTGGGAGACAGGCATTTCAT
TTCTCACCTTACAGATGGGGGCACAGAGCACAGGGAGGATCTTGAGAGGGTCCCATGGTCAGCAAGTGTTGGTGAAAGGATATCATCCTGGCTGGTC
CTACCCAGGTGCTCCATCTTCATCCTATAAAACTCTCTGTGCTTTAGTTTCTTCTATGAAACAGGACACCTATTTCATAGGGTAGTTGTCGGGATTA
GTGATAAAGTGCTAAGAGTAATAGCTGGGGCACAGTTAATCCTATGTAAATATTGGCGAATTGTCTTAGTCTGTTGCCTGTTGCTATAATGGAATAC
CATAGAGTGGGTAATTTACAAAGAAAAGTATGTATTATTATGATTCTGGAGGCTGGGAAGTCCAAGAGCATGGCACTGGTACCTGGTAAGGACCTCC
TTGCTGC
HUMAN SEQUENCE - mRNA
CGCTCGATCTTGGGACCCACCGCTGCCCTCAGCTCCGAGTCCAGGGCGAGTGCAGAGCACAGCGGGCGGAGGACCCCGGGCGCGGGCGCGGACGGCA
CGCGGGGCATGAACCTGGAGGGCGGCGGCCGAGGCGGAGAGTTCGGCATGAGCGCGGTGAGCTGCGGCAACGGGAAGCTCCGCCAGTGGCTGATCGA
CCAGATCGACAGCGGCAAGTACCCCGGGCTGGTGTGGGAGAACGAGGAGAAGAGCATCTTCCGCATCCCCTGGAAGCACGCGGGCAAGCAGGACTAC
AACCGCGAGGAGGACGCCGCGCTCTTCAAGGCTTGGGCACTGTTTAAAGGAAAGTTCCGAGAAGGCATCGACAAGCCGGACCCTCCCACCTGGAAGA
CGCGCCTGCGGTGCGCTTTGAACAAGAGCAATGACTTTGAGGAACTGGTTGAGCGGAGCCAGCTGGACATCTCAGACCCGTACAAAGTGTACAGGAT
TGTTCCTGAGGGAGCCAAAAAAGGAGCCAAGCAGCTCACCCTGGAGGACCCGCAGATGTCCATGAGCCACCCCTACACCATGACAACGCCTTACCCT
TCGCTCCCAGCCCAGCAGGTTCACAACTACATGATGCCACCCCTCGACCGAAGCTGGAGGGACTACGTCCCGGATCAGCCACACCCGGAAATCCCGT
ACCAATGTCCCATGACGTTTGGACCCCGCGGCCACCACTGGCAAGGCCCAGCTTGTGAAAATGGTTGCCAGGTGACAGGAACCTTTTATGCTTGTGC
CCCACCTGAGTCCCAGGCTCCCGGAGTCCCCACAGAGCCAAGCATAAGGTCTGCCGAAGCCTTGGCGTTCTCAGACTGCCGGCTGCACATCTGCCTG
TACTACCGGGAAATCCTCGTGAAGGAGCTGACCACGTCCAGCCCCGAGGGCTGCCGGATCTCCCATGGACATACGTATGACGCCAGCAACCTGGACC
AGGTCCTGTTCCCCTACCCAGAGGACAATGGCCACAGGAAAAACATTGAGAACCTGCTGAGCCACCTGGAGAGGGGCGTGGTCCTCTGGATGGCCCC
CGACGGGCTCTATGCGAAAAGACTGTGCCAGAGCACGATCTACTGGGACGGGCCCCTGGCGCTGTGCAACGACCGGCCCAACAAACTGGAGAGAGAC
CAGACCTGCAAGCTCTTTGACACACAGCAGTTCTTGTCAGAGCTGCAAGCGTTTGCTCACCACGGCCGCTCCCTGCCAAGATTCCAGGTGACTCTAT
GCTTTGGAGAGGAGTTTCCAGACCCTCAGAGGCAAAGAAAGCTCATCACAGCTCACGTAGAACCTCTGCTAGCCAGACAACTATATTATTTTGCTCA
ACAAAACAGTGGACATTTCCTGAGGGGCTACGATTTACCAGAACACATCAGCAATCCAGAAGATTACCACAGATCTATCCGCCATTCCTCTATTCAA
AGTGCAGTGACACAATCTCAGCTCACTGTGACCTCCGCCTCCTGGGTTCAAGAGACTCTCCTGCCTCAGCCTCCCTGGTAGCTGGGATTACAGGTGT
GAGCCACTGCACCCACCCAAGACAAGTGATTTTCATTGTAAATATTTGACTTTAGTGAAAGCGTCCAATTGACTGCCCTCTTACTGTTTTGAGGAAC
TCAGAAGTGGAGATTTCAGTTCAGCGGTTGAGGAGAATTGCGGCGAGACAAGCATGGAAAATCAGTGACATCTGATTGGCAGATGAGCTTATTTCAA
AAGGAAGGGTGGCTTTGCATTTTCTTGTGTTCTGTAGACTGCCATCATTGATGATCACTGTGAAAATTGACCAAGTGATGTGTTTACATTTACTGAA
ATGCGCTCTTTAATTTGTTGTAGATTAGGTCTTGCTGGAAGACAGAGAAAACTTGCCTTTCAGTATTGACACTGACTAGAGTGATGACTGCTTGTAG
GTATGTCTGTGCCATTTCTCAGGGAAGTAAGATGTAAATTGAAGAAGCCTCACACGTAAAAGAAATGTATTAATGTATGTAGGAGCTGCAGTTCTTG
TGGAAGACACTTGCTGAGTGAAGGAAATGAATCTTTGACTGAAGCCGTGCCTGTAGCCTTGGGGAGGCCCATCCCCCACCTGCCAGCGGTTTCCTGG
TGTGGGTCCCTCTGCCCCACCCTCCTTCCCATTGGCTTTCTCTCCTTGGCCTTTCCTGGAAGCCAGTTAGTAAACTTCCTATTTTCTTGAGTCAAAA
AACATGAGCGCTACTCTTGGATGGGACATTTTTGTCTGTCCTACAATCTAGTAATGTCTAAGTAATGGTTAAGTTTTCTTGTTTCTGCATCTTTTTG
ACCCTCATTCTTTAGAGATGCTAAAATTCTTCGCATAAAGAAGAAGAAATTAAGGAACATAAATCTTAATACTTGAACTGTTGCCCTTCTGTCCAAG
TACTTAACTATCTGTTCCCTTCCTCTGTGCCACGCTCCTCTGTTTGTTTGGCTGTCCAGCGATCAGCCATGGCGACACTAAAGGAGGAGGAGCCGGG
GACTCCCAGGCTGGAGAGCACTGCCAGGACCCACCACTGGAAGCAGGATGGAGCTGACTACGGAACTGCACACTCAGTGGGCTGTTTCTGCTTATTT
CATCTGTTCTATGCTTCCTCGTGCCAATTATAGTTTGACAGGGCCTTAAAATTACTTGGCTTTTTCCAAATGCTTCTATTTATAGAAATCCCAAAGA
CCTCCACTTGCTTAAGTATACCTATCACTTACATTTTTGTGGTTTTGAGAAAGTACAGCAGTAGACTGGGGCGTCACCTCCAGGCCGTTTCTCATAC
TACAGGATATTTACTATTACTCCCAGGATTCAGCAGAAGATTGCGTTAGCTCTCAAATGTGTGTTCCTGCTTTTCTAATGGATATTTTAAATTCATT
CAACAAGCACCTAGTAAGTGCCTGCTGTATCCCTACATTACACAGTTCAGCCTTTATCAAGCTTAGTGAGCAGTGAGCACTGAAACATTATTTTTTA
ATGTTTAAAAAGTTTCTAATATTAAAGTCAGAATATTAATACAATTAATATTAATATTAACTACAGAAAAGACAAACAGTAGAGAACAGCAAAAAAA
TAAAAAGGATCTCCTTTTTTCCCAGCCCAAATTCTCCTCTCTAAAAGTGTCCACAAGAAGGGGTGTTTATTCTTCCAACACATTTCACTTTTCTGTA
AATATACATAAACTTAAAAAGAAAACCTCATGGAGTCATCTTGCACACACTTTTCATGCAGTGCTCTTTGTAGCTAAACAGTGAAGATTTACCTCGT
TCTGCTCAGAGGCCTTGCTGTGGAGCTCCACTGCCATGTACCCAGTAGGGTTTGACATTTCATTAGCCATGCAACATGGATATGTATTGGGCAGCAG
ACTGTGTTTCGTGAACTGCAGTGATGTATACATCTTATAGATGCAAAGTATTTTGGGGTATATTATCCTAAGGGAAGATAAAGATGATATTAAGAAC
TGCTGTTTCACGGGGCCCTTACCTGTGACCCTCTTTGCTGAAGAATATTTAACCCCACACAGCACTTCAAAGAAGCTGTCTTGGAAGTCTGTCTCAG
GAGCACCCTGTCTTCTTAATTCTCCAAGCGGATGCTCCATTTCAATTGCTTTGTGACTTCTTCTTCTTTGTTTTTTTAAATATTATGCTGCTTTAAC
AGTGGAGCTGAATTTTCTGGAAAATGCTTCTTGGCTGGGGCCACTACCTCCTTTCCTATCTTTACATCTATGTGTATGTTGACTTTTTAAAATTCTG
AGTGATCCAGGGTATGACCTAGGGAATGAACTAGCTATGGAAATAACTCAGGGTTAGGAATCCTAGCACTTGTCTCAGGACTCTGAAAAGGAACGGC
TTCCTCATTCCTTGTCTTGATAAAGTGGAATTGGCAAACTAGAATTTAGTTTGTACTCAGTGGACAGTGCTGTTGAAGATTTGAGGACTTGTTAAAG
AGCACTGGGTCATATGGAAAAAATGTATGTGTCTCCCCAGGTGCATTTTCTTGGTTTATGTCTTGTTCTTGAGATTTTGTATATTTAGGAAAACCTC
AAGCAGTAATTAATATCTCCTGGAACACTATAGAGAACCAAGTGACCGACTCATTTACAACTGAAACCTAGGAAGCCCCTGAGTCCTGAGCGAAAAC
AGGAGAGTTAGTCGCCCTACAGAAAACCCAGCTAGACTATTGGGTATGAACTAAAAAGAGACTGTGCCATGGTGAGAAAAATGTAAAATCCTACAGT
GGAATGAGCAGCCCTTACAGTGTTGTTACCACCAAGGGCAGGTAGGTATTAGTGTTTGAAAAAGCTGGTCTTTGAGCGAGGGCATAAATACAGCTAG
CCCCAGGGGTGGAACAACTGTGGGAGTCTTGGGTACTCGCACCTCTTGGCTTTGTTGATGCTCCGCCAGGAAGGCCACTTGTGTGTGCGTGTCAGTT
ACTTTTTTAGTAACAATTCAGATCCAGTGTAAACTTCCGTTCATTGCTCTCCAGTCACATGCCCCCACTTCCCCACAGGTGAAAGTTTTTCTGAAGT
GTTGGGATTGGTTAAGGTCTTTATTTGTATTACGTATCTCCCCAAGTCCTCTGTGGCCAGCTGCATCTGTCTGAATGGTGCGTGAAGGCTCTCAGAC
CTTACACACCATTTTGTAAGTTATGTTTTACATGCCCCGTTTTTGAGACTGATCTCGATGCAGGTGGATCTCCTTGAGATCCTGATAGCCTGTTACA
GGAATGAAGTAAAGGTCAGTTTTTTTTGTATTGATTTTCACAGCTTTGAGGAACATGCATAAGAAATGTAGCTGAAGTAGAGGGGACGTGAGAGAAG
GGCCAGGCCGGCAGGCCAACCCTCCTCCAATGGAAATTCCCGTGTTGCTTCAAACTGAGACAGATGGGACTTAACAGGCAATGGGGTCCACTTCCCC
CTCTTCAGCATCCCCCGTACC
HUMAN SEQUENCE - CODING
ATGAACCTGGAGGGCGGCGGCCGAGGCGGAGAGTTCGGCATGAGCGCGGTGAGCTGCGGCAACGGGAAGCTCCGCCAGTGGCTGATCGACCAGATCG
ACAGCGGCAAGTACCCCGGGCTGGTGTGGGAGAACGAGGAGAAGAGCATCTTCCGCATCCCCTGGAAGCACGCGGGCAAGCAGGACTACAACCGCGA
GGAGGACGCCGCGCTCTTCAAGGCTTGGGCACTGTTTAAAGGAAAGTTCCGAGAAGGCATCGACAAGCCGGACCCTCCCACCTGGAAGACGCGCCTG
CGGTGCGCTTTGAACAAGAGCAATGACTTTGAGGAACTGGTTGAGCGGAGCCAGCTGGACATCTCAGACCCGTACAAAGTGTACAGGATTGTTCCTG
AGGGAGCCAAAAAAGGAGCCAAGCAGCTCACCCTGGAGGACCCGCAGATGTCCATGAGCCACCCCTACACCATGACAACGCCTTACCCTTCGCTCCC
AGCCCAGCAGGTTCACAACTACATGATGCCACCCCTCGACCGAAGCTGGAGGGACTACGTCCCGGATCAGCCACACCCGGAAATCCCGTACCAATGT
CCCATGACGTTTGGACCCCGCGGCCACCACTGGCAAGGCCCAGCTTGTGAAAATGGTTGCCAGGTGACAGGAACCTTTTATGCTTGTGCCCCACCTG
AGTCCCAGGCTCCCGGAGTCCCCACAGAGCCAAGCATAAGGTCTGCCGAAGCCTTGGCGTTCTCAGACTGCCGGCTGCACATCTGCCTGTACTACCG
GGAAATCCTCGTGAAGGAGCTGACCACGTCCAGCCCCGAGGGCTGCCGGATCTCCCATGGACATACGTATGACGCCAGCAACCTGGACCAGGTCCTG
TTCCCCTACCCAGAGGACAATGGCCACAGGAAAAACATTGAGAACCTGCTGAGCCACCTGGAGAGGGGCGTGGTCCTCTGGATGGCCCCCGACGGGC
TCTATGCGAAAAGACTGTGCCAGAGCACGATCTACTGGGACGGGCCCCTGGCGCTGTGCAACGACCGGCCCAACAAACTGGAGAGAGACCAGACCTG
CAAGCTCTTTGACACACAGCAGTTCTTGTCAGAGCTGCAAGCGTTTGCTCACCACGGCCGCTCCCTGCCAAGATTCCAGGTGACTCTATGCTTTGGA
GAGGAGTTTCCAGACCCTCAGAGGCAAAGAAAGCTCATCACAGCTCACGTAGAACCTCTGCTAGCCAGACAACTATATTATTTTGCTCAACAAAACA
GTGGACATTTCCTGAGGGGCTACGATTTACCAGAACACATCAGCAATCCAGAAGATTACCACAGATCTATCCGCCATTCCTCTATTCAAGAATGA

[0300] TABLE X

MOUSE NOMENCLATURE
ICSGNM Notch1
Celera mCG18747
HUMAN NOMENCLATURE
HGNC NOTCH1
Celera hCG1780817
MOUSE SEQUENCE - GENOMIC
GTCTGGAGGTTTTATTTGTCCCTGAGGGGGTGCCATTTTGGTTTGGGGGTATGATATGAAGAACCTGTGTCTGAGAGCGGAGTTGTAGAGAGTGGGC
AGCAGCCAGCATCCTGGCATAGTCCCCTTGCTACAGGGCAGGAACTGAAGAGAGAGAAAGCACACACAGTCTCCAGTCTGCTCTGCTTCCCGCGTCC
ACTGTGCTATTGATGTTTGAAAGTGGAAGGAACCGTGAACTCTTTTATTACCCAGATGATGCATATTCATGACAGAAGCTGGGAGAGAAAAGCAGAC
CAGCCTCCTAAATGAGAGTTTCACAGAGTCTATGTCGACATCCCCCCACAGGGCTGGGGGGAGGGGGCTCTGCTGCGCCTGTAGGCTCACTTCGAGT
GTAGACCCAGATTTGAAATCTGCCTGGTTTGAAATTCAGGCTGGTCTTGTCTCTAGCCTGGCCCCAATTAACAGTCATTATTATTTCTTTTTTATTC
AGGTGAGGTTCACTTAGTATGTGAAAGTAACCCCTTTAAAGTGAGCGCCTCCATGGCATGCTCCAGAGCTTACGTCATCCCAGAAACCTCTGCCCAG
CAAGCAGCCACTGCACCTCCATTCTAGAGCCTGATTCCAGTTGCACCCACTGCCCAAGGTCGGGTAGCCTGTGGCCATGAGAGATGAGGGCGGGGAG
CTGACTGCCCTACATGTCTGTCAACAGCTGCAGCGGAGCCTTTGTGGGCCAACGATGCCAGGACTCCAATCCTTGCCTCAGCACACCGTGTAAGAAT
GCTGGAACGTGCCACGTTGTGGACCATGGTGGCACTGTGGATTATGCCTGCAGCTGTCCCCTGGGTTTCTCTGGGCCCCTCTGCCTGACACCTCTGG
ACAACGCCTGCCTGGCCAACCCCTGCCGCAATGGGGGCACCTGTGACCTGCTCACTCTCACAGAGTACAAGTGCCGCTGCCCACCAGGGTGGTCAGG
TAAGGGCTATAGGAGGTTGTGAACTTCACGGTTGGGACCCTTAGGCCTGGGCCCAAGGACCCTATCTTTGTTGACTTGACATACTCTGGTACACTAA
ACTTTATCCTCTCCTGGATCAGAGTTAAGCTGGGATCTACTATCCAGAAAAATCTTGGGGATTCCTTGGGAACTCTGGTCCTTTTCAACCCCAAACT
ATCTGATTTTTGGCTGCCCTGTTCCAGGACCCCAACCTCTCACTGTTTCTGTGCGTAAAGAATGAGTCCTCATGTAGCCCGGGTCTTACCATCTCCT
TGTCAGGGTGCCTCAGGTTTCCATTGCTTCTCTATGTGGGGTCCAGGAGACAGCTAGGTACAAATTTTAGACTGCCATTCCTACTTTCTGTCCTTGA
GCAGTCACTTAGTCTCTTATGACTTACAGTCCTCTGTATGCAGAAAGATGGCCACATTCTGCAACAGATACTGAGCATCATGAAGATAACACTTTAG
ATCTATCCCTGGTTGGTACCTACATGATGTCCAAATCTGCCCTGGGTTCACAGGGAGGCCCTGGCAACAGCTGACCCTCTTCTCTGCCTCCCAGGAA
AATCATGTCAGCAGGCTGACCCCTGTGCCTCCAACCCCTGTGCCAATGGTGGCCAGTGCCTGCCCTTTGAGTCTTCATACATCTGTCGCTGCCCGCC
TGGCTTCCATGGCCCCACCTGCAGGCAAGATGTTAATGAGTGCAGCCAGAACCCTGGGCTGTGCCGCCATGGAGGCACCTGCCACAATGAGATCGGC
TCCTATCGCTGTGCCTGCCGTGCCACCCATACTGGTCCCCACTGTGAACTGCCCTATGTGCCCTGCAGCCCCTCACCCTGCCAGAATGGAGGCACCT
GCCGTCCTACAGGGGACACCACCCACGAGTGTGCCTGCTTGCCAGGTAGGTTCCATCTCAGTATGCTGGCATCTAGCCTGGTTGTCCATGTCCATGC
GTGTTCCACTGTCAAGCCCGAGGGATGCAGAAAGAGTTAATACCCTTTGAAGGGAGCCCAAAAAGAAGTTTAGAGAAGGGCAGCAGCCATGGAGCCT
TAGGTGTGGTATAAGAGCAGGTCAGGATAGGGATACCAGAAGTGAGGGGACACTCTCAGTGACACCACACACGTCTATTTCTGTCTGGGCCATCTAC
TGAGATCCAGTTAGTTTGGTGCATAACCTCCAAGCCTTCTTTCTGCTGATAAGACTGCCTTCCCTTGGTATTTTCTTCATGCTGGGCCTCCCCTGAC
CCATAGCCAACTAATACCCACCATGTCAATACCCTGAGCCTCTTAGGGCAGGGAGCCAGCCTGCCTTTACAGATGCTCATGAACTGTTTGGAATCCA
CATGTGACTCTCTGTATGTTACGGGAGCACCCTGTCATGGGCAGTCCCTGGGGTTTCCCCTTTCTCTGGGGATGGTAATTGAATAACAGGGTCTTGA
GGGCCTTAGGGGCCTCACGTTTTTCATTACTTCCTCTGCAGTGTTCTTCCCACTGTGCTCAATGTCTCTGCAGGGGTGGGGCCTGCAGGCACAGCCC
TAGTCCTTTCTGTTGCTGCTCTAACGATGGTAACTCGGTGATCTAAGGCAGCTTGGAGCTGCCGCCAACCCACTTTTGGCAAGGGTGGGGTTGGTCA
ACATACCAGGCCGTTGAGAGGAAGGAGGAGTGGGCTCAGGAAATAGGAATAGATTTGGTTGCTGGGGGTGACCTCGGACCACTCCCCTTGCAACCCC
GGGGCCACCCTACACACTGAAAAAGGGAAGTTCCCTTCTGCCCCAAGCTTGCAGAGCCAGCCTCAAGACTGCGTGCAGACACTGGCTTATACATTTC
CTGAAAGTCATTGGGCAAGCTCGGAGGTAGCCGACAGCTGCCTACACGCTTCCCAGCCTCCCTGGGGGGGCTGGGACAGGATCCTCACGCTCAGGAG
GGCCCCAGAGCTGAGTTCAGCTCTGTCTTGGTGGCCACCTAAGACCTCAGCTGTTAGAACCTGTGTTGAGAGGCTAGACTGGGTCTGTCATGCAGAC
TGAGAGAAAGCCTTGTTCAAGGAGCTTGTGAATGGAGCTGCCACCAATCCACCTTAGGCAGGGTGGGGTGGGTCAACTCAGAGTGCTGGAAGATGGG
CAGGAGGGAAGCAAGGACTGGGTGGGGTCCCTTTACCTTAGCCGGTGGGTCATCCCTGAAGACGGAACACACACTACCCTGTGCTGTGTGGAGACAT
GCTGTTTCAGAGTAGGGAGAAGTGAAAATTGTCCACCCAAATTGCTGTTGAAGGGAGTCCGGTCTGGGCACAGTTATACCCACCATTTGGGCTCCCA
GGTAGCTATTTACCAGGTTTCTGAAGAATGTATGAACTAGGGTGGACATAAAGAACTAAGATGGGAACAGAACTTAAGCCTGAGAGCTGACTGGGAA
TTAAAGCGACTCTGGCTCCTGTATATCTATCCTCTCACTCTCTCACAAGCCCGGTTTCCCTGGAGGAGGCTGTATAGGCAGAGAAGGCTTTGGCCAG
GCTCCACATAGGACCTATGATCCCTTCTCCTCGCCCCCAGTGAAATCCTTCTACACCTGCTCAGGGCCCCTCCAGGCTCGCTTCTTCTTGGAAGCGT
GCCCTGTGCTAGAATAAATCTCTGCACAGGCAGGGAGACAAGCTATTTGGTCTTGCTGACCCCTGGGCGGGCACTAGGCTCCAAGTTGGTTCCTCCC
TCACCCAGATAAGCCTTTTCCAAGCCTCCAGCTTCTTGCTGTGGTGCAAGATGGTGGGGTGGAGGGGCATCTTTGAGGAGGAGGCAGACAGGTGGGT
TCTCCAAGGGCAGGAGGGGTTCAAAGGCATCCCCAGAGATGGTGTTAATTAGTAACCGGCTGCAAGTTTGGCTGTTGCCAGACTCGCCTTTCTGGGT
TGATCATTGACCCGGCAGGAGTTGAGGAGATTAATAGCTAACTAGCTGCTGAGCAGGCCCTCAGGAAGCCACACTGCAGGCCACACCTTGGGGCCCA
GCCCCAGGCTAGATGGGCTTGTAGAAGAGAGATGGTTGCCCTGGCTGTGCCCTGAGGAAATCACAGGTTCTGACTGAGCGGGCCTGCCTGGATCCCA
CCACTCTGGTTTCTAACTTAGTGCTCCCAAGCCCCACTTTTAGCTCCAGCAGTTTTAGGTATTCGTGGCTGCCCCACTGATTCAGTGTGGACAACCA
TAGAGTGCAATCCTCTGAAACTCTGTTAGTGGTTTTGTGGCAGAACCTCCAAGGACACTATGTTCCTAGATCCCTGTCTGTTGAGTCAGCTCTTTAC
ATAGCGACTTTCTAGAGAAGAGCTGTCACCTGTGGACACGGGAGTAGGGATGCCACGGAAGGACAGACAGATGCCTTGTCCAGAGCAGAACATTGCA
GGTCCACCCAGAATCTGAAGATACCGGAGCCCACCCGAGGCTCCTCAGCAGACTTCTGAGGTCAGGCTAACCTGCTGGCTGGCCCCTGTCCCACAGG
TTTTGCTGGACAGAACTGTGAAGAAAATGTGGATGACTGTCCAGGAAACAACTGCAAGAATGGGGGTGCCTGTGTGGACGGCGTGAATACCTACAAT
TGCCGCTGCCCACCGGAGTGGACGGGTATGTATATGGGACTTGTAGGCAGCAGCCTTCCACTAACAAAACTGCACACCGCGGAGTGGTAGGAAGGTC
TGAACTCTGTTCCACGCTATGAAAGCCCACACTGCAAGACCCAGGGTGGCTGGTAGCATGGGAGCAGCAGCTTCTGTGCTTCCAGTTGGAGTCAGCA
CAGCTCAGCATCAGATGGTTCTTGTGAGCTATTAGCAGCTAACATCCAGAGTCAGGCCCCCAGCACTGAGCCATACAGGAGCTAGCATTCTGGGCAA
GCTACCAGGGATGAATACAAGGTTGTCCTCAGCCCCACAGCCCAGAGCACGGAGCTCATCTTGTAGCTGAGGTTGATGTTCCTGTGACCCCTCATAG
GTCAGTACTGTACAGAGGATGTGGACGAATGTCAGCTCATGCCCAATGCCTGCCAGAATGGCGGAACCTGCCACAACACACACGGCGGCTACAACTG
TGTGTGTGTCAATGGGTGGACTGGCGAGGACTGCAGTGAGAACATTGATGACTGTGCCAGTGCCGCCTGTTTCCAGGGTGCCACTTGCCACGACCGT
GTGGCTTCCTTCTACTGTGAATGTCCGCATGGGCGCACAGGTAAGTCGGTGCAGGAATGTCCTGGGAGAAGGGAAACTTGGTTGGCTCACCACCCCT
GGTGGAAACACCTGGGGAGCCATGTATGAGATATATATACAGATATATGTGTGTATATACATATATATATATATATATATATATATATATATATATA
TATATCAGATATAGATACAGCTCAGATGTAGATACAGGGCTGGAAATGCAGCACAGTTGGTAGAGTGGCTGCCTAGCATGCACAGGATACTGGACTC
AATCCCTAGGACCACATAAACTGTGGGTAGTGGCACGTGCCTGTCAAGCCAACTCCCAGGGAAGAGTGAATCCAAAGGTTAAGGCCATCTTTAGCTA
TATAGCAAACTTGAGTTCAGCCTGGAATATGTGAGACCCTGTTTTAGGAAAGGGATGGGGAGAGAGAAAGCTCTGTCTCTTTGGCACCTCCAGCAAT
GACCCAGTAAGCCTTGCTGGACAGAGGCATCCTGGTGATCTGAACTTTGTGGGATGCTTGAGTGAGTCAGAGAGATTCATTCCAGGGTGTTGGGTGA
GGATGGCCCTGCTGCAACAACCTGTTAATCCCAGGATAGGGAAAAGCAGCACCCACTCACCGCAGCTGCCTTGTCTAGGTCTGCTGTGCCACCTCAA
CGATGCGTGCATCAGCAACCCCTGCAACGAGGGCTCCAACTGTGACACCAACCCTGTCAACGGCAAAGCCATCTGCACCTGCCCCTCGGGGTACACA
GGGCCAGCCTGCAGCCAGGACGTGGATGAGTGTGCTCTGGGTAGGTACAGATGCAGTGGCACAGGCAGCAGGAACGGGCTGGCTGTCACATATATGG
GATGTGATCTGTCCTGGAGAACCACCATTTTGATGGCCTGGGCTGGGGCATTGCGGGTGGTCGGGAGGCTGCAAGGCCAGATGAGCCCTCATCCGTG
CCCGCTGTGAGATTGATGTTAATGAGTGCATCTCCAACCCATGTCAGAATGATGCCACTTGCCTGGACCAGATTGGGGAGTTCCAATGCATATGTAT
GCCAGGTATGTCTTATGCCATTTCCCACCATGGGGGCTGCTAAGAGCAGGCAGCAGGGGAATGAGTCAAGGCTGCATAGCTTCAAGTAACATTTCTG
TCATGGTTGGTAGCATCTGGGAAGCCGAGGCCAGGATAACAGGACAAAGTGGAGAATGTACCCAGAGTTGGGTGCATAGACTCAGTAGATATAGACA
TGAACCACAGTGGGCACACTAGGCCCGTATGAGGGAGGGTTATTTCTCTCCCAAGTCTTCAGCTGGGGCTCTAGAAGGACCTACCGAAGCCGTCCTC
GGTCTCACCATCTCCCGTCCACAGGTTATGAAGGTGTATACTGTGAAATCAACACGGATGAGTGCGCCAGCAGCCCCTGTCTGCACAATGGCCACTG
CATGGACAAGATCAATGAGTTCCAATGTCAGTGCCCCAAAGGTGAGGCCACCTACTTACCACAGGACCCGTATCCTCATGATCTCTTCCCAGACTCC
TTTGAGGGAGGACTTGAGTTGACTAGGGCGTTTTCAGGCTTTCCTCAAAAGGTAAAGGCCCACGTGAGCAGTGGACGCTGTAGGGGACCTGGCACCG
GAAACCCTTTACTAAAGGAGGGAAGGATGGGCAGGAGCTGCAGCGCTCCTAAGATAGGAGAGTCCACCTGCTTGGCTCTGTCCTCTTCCTGATGGTC
ATGGGAGTAAGGACATAGTGTGGGGATCTGACCTCTATGCCTGGGAAGGACTTGGAGGAACTGAAGAGGGGACCAAAGTCCTGGGAATCTGTCTCTT
GCCTACTCCAGGGCTGGACCAGGCCTTGGGCCTTCTGAGATGTAAATAAGCCATCCTAGACTTGGTCCAGCTAGGGGAGTCCCATTCACAGCCTAGT
GCAGCTGTAACCATAGCAACCAGAGTCTATTTAGGAAAAAGGCCCCTCTGTTGGGCCAAGGAGGCAGCCACTGAGCAGTGCTAAACAAGGAGCTGAT
TAGAGGGGCAGGGTGCAAGGGGCAGGATATAAGGGCTGGTTGAAGCCTGGAGGTTAGTGGCCCCTGTTATCAAAGTACCCTCTAGGGAGCCCATGTG
AGCAGACATTCAACTCTAAGGTTTGTGGGTAGCAACCAAGGGGTTAGGATACTGTCAGATATAACCATCTCGTCTTCCCTGGCCACAGGCTTCAACG
GGCACCTGTGCCAGTATGATGTGGATGAGTGTGCCAGCACACCATGCAAGAACGGTGCCAAGTGCCTGGATGGGCCCAACACCTATACCTGCGTGTG
TACAGAAGGTACAAGAGGCAGTGCAAGATCTGGGGGAGGGAACTCTTGAGGCTAGATAGTGCTGAGAAGGGGACAGGAAACTGGGGAGGCCTTAGTT
TGGGGCCATATAATCTGAGAGTCAGAAACTTAACTCCGCTTGGACTCCAGGCAGGAGTGATGAGAACATCCCTGGGTATGTGATACCCCACATCCAT
CGATGACCAGGCAGTGATCCTGGGCCTGCTCGGTGGTTTGCCAAGGTGTGGCCAACTAAGTGTTGAGGGAGTAACTGGCCCTGAAGCTCACTAATGT
CCACCTTTCCTGCCATCTAGGTTACACAGGGACCCACTGCGAAGTGGACATTGACGAGTGTGACCCTGACCCCTGCCACTATGGTTCCTGTAAGGAT
GGTGTGGCCACCTTTACCTGCCTGTGCCAGCCAGGCTACACAGGCCATCACTGTGAGACCAACATCAATGAGTGCCACAGCCAACCGTGCCGCCATG
GGGGCACCTGCCAGGACCGTGACAACTCCTACCTCTGCTTATGCCTCAAGGGAACCACAGGTGACTGGCCGGAGCTGGCAGTGGGTGGAAAAGGGTG
AGGCCAGGCTTGGAAGCTGACCACATGTCATGCTGCCCCTAGGGCCCAACTGTGAGATCAACCTGGATGACTGCGCCAGCAACCCCTGTGACTCTGG
CACCTGTCTGGACAAGATTGATGGCTACGAATGTGCCTGTGAACCAGGCTACACAGGTGAGTGGCTGAAGGCAGAGGTCAGGGTCATCCCTAGAGTC
TGGGAGGGACTGTGGGGCTAGCCAGGGTCCAAGGGCTGGATGTCACAAGCTGGGTGTCAACTACCCAGATCTTGATCTGCCAACCAGTAGAGGTATC
TATCATAAAGACTGGGTGGCCTCCATATGCCTCCTTTCCCCTGTCAGTGTCAGCCCTGGCCATGCCAGACTTAAAGCCCCAGTAGCCTGAAGTGGGG
TGGCCAGAGCTCCGAGGCCAGGCTTTTGGATATGTGTTTAGATCTGATAAAATCCTTAGTTTCTCTGAGCACCGAGGACATTGTCCACCAGAGGATA
GAAGAGGATGGGTGGTCTCAGGCTGAGGTAAAGCTGGGCTGCAGAGTGACTCAGTTGGTAAGGTGTTGACCTAGCATGTGTAAACCCTGGGTTCAGT
CCTCCTGCCATGTTAACCAGATGCAGTGGCATGCATACGTTGTAACCCTAGCACTCTGACATTGGAAGCGAGAGGATCAGAAGTTTAGGTCATTCTC
AGCTACATGTGAGTTTGTGGCCAGACTGGATCACATGAGGCTCAGAAGCTACTGGCACTACGGTCATGTAACTCATCGATACATAAGGCACTTTACT
ATCGCTCAAAGTTTCATAGATTAGCACAAGGGGAAACTTAGACCCAGCTAGGTCTAGCTCTAGGAGGGGTAGGCTCTGGGTGGCAGGCCTGGAATCT
GAGCCCCTTCCCACCCACAGGAAGCATGTGTAACGTCAACATTGACGAATGTGCGGGCAGCCCCTGCCACAACGGGGGCACTTGTGAGGATGGCATC
GCGGGCTTCACTTGCCGCTGCCCCGAGGGCTACCATGACCCCACGTGCCTGTCCGAGGTCAACGAGTGCAACAGTAACCCCTGCATCCACGGAGCTT
GCCGGGATGGCCTCAATGGGTATGGCAGACTGACCTGGGAGGGACTAGCTGTAGCCTTGGGCAGACACAGGCTGGGTGAATGGGTGCTCCTGTGAGA
CCAGTGATCTGAGGTCAGCCCCTAGTGTCTTCCCAGCATCCCTGGGCTGTATCCTCATTGGCTAGCATCAGCTCAGGATATAGACTCTAAGCACACT
GTGGCTGCTGAAACAGTTGTCTGATACTGTGGTGACAGCAGCCCTTTGTCAGTGTGTGGGGGACGAGGAGATTACTAAGGTCTCCGTTAAAACTATT
AAAGTTTTATACAGAGGGTCAGCATTGTCAAGGTGGCATTGTTCCAGTCTGGAACCCTTGCACGGTCTTGGGCCAGGTGGGTACCTCCAGCCCAGTG
GATGATGTGGCCTTGTCCTCAGACTGGAACTGTAGTTTAGCAGGAGAGCTCTGAGCCCAGGCTACAGCTCAGGCCTCTCCGTAGGTACAAGTGTGAC
TGTGCCCCTGGGTGGAGTGGAACAAACTGTGACATCAACAACAACGAGTGTGAGTCCAACCCTTGTGTCAACGGTGGCACCTGCAAGGACATGACCA
GTGGTTACGTATGCACCTGCCGAGAAGGCTTCAGTGGTAAGTGTGGCGGGTGACACAGCAGAATGGGTCCTCCCTTTGGTCTCTTTCTCGGTCCACC
TGATGAGCTAGCATTTCTCAGGCAGAGATCCTAGTTCTCTTGAGGAAAGGCATAGGGCAGAGGCTCTGGCCCACCTCCTCTTGCTCAACTTCCTTAC
AGGCCCTAATTGCCAGACCAACATCAACGAATGTGCCTCCAACCCCTGCCTGAACCAGGGGACCTGCATTGATGATGTCGCTGGATACAAGTGCAAC
TGTCCTCTGCCATATACAGGTACGAACAGCCAGGGACTGGAATTGGCTCTGGTGGTAGCTAGTGGAGCTAAGAGTATATGGGCTTACCAGGCACTGA
AGAAGGTTCTGTTCCTCGCTGAGGGTCTTAGGTCCTCAGACTGGAACTGTAGTTAAGCAGGAAGGCTCTGAGCCCAGGCTACAGCCCAGGCCTCCTG
GGCCTGGGGATAGTCACCAGATGGGCAAACACAGAGGATGCCTAGGAGGAAGCTCCAGGCCGTGTGTCCGGGTGTTTATCTGGTATGTCTGGAGTGA
GGTGAGCACTGGACTCCTCCAGAGAAAGTCTGGGAGGCTGACTGGTAGGTACTGCATGGATCAGGGTCCACTTTGCCTGTGCCTCTGGGGGCCCTGG
CTGCCCTCCTCTGCTGGCTGGGCCTGGGATTCCTTTGATGGCAGCTTCTTTGTGTGAGGAGACAAGGAGCCCTCTGTTAGATGAACAGAGGCAGCTC
CTGCCATGGGCACTGCCTGAGGAATGGCGAGAAATAGACCCCCTGCAGGAGAGATGTGCATTGAACATGAAAGCCGTGACCACATGGCCCCCAACCC
TGCAGCTCCCAATACTGCCACAGAGTACTGGTGGCTTCATGCTGCTGCTGCTAGGTTCTGGACATAGCAAGTGGGTCTGTGAAGGTGGAGGCCCTTC
CAGTGTTCCTATGATGCCTGGCAGGATGCTGTTTTCTTTGACAAAGTTAAAGGGCCTGGATTTTGTCTCCTGTGTTGGTCAGTGAGGAAACTGTCAG
CAGCCAGGCACACCCCATGTTCCTTTTGGTCTTGCTGCTATCGGGGCTAGCGGGAGGAGTCAAGCCGCGCTGACCAGCTTCCTGCTTCCCTTTGCAC
AATTGTCGGAAACTCTGTCAAAGTTCCTGTCTGCCCAGGTCACCGTGGAAACCGATAGAGAGAGAGGCCCTGGAGAGTCTCACCAGTGGGCTGGGGA
CATGGTGGGAGACAAGGAAGATAAGGTTTCCTTGCTTAGCTCCTGGAGCCAACCATGGCCATAAACAGGAAAGCTAACTGGGATTGCAAGGAGAGTC
ACCTGGGTTACTCGTGGCTCCCCCAAGCGGTTATCAGATTTCACTGCCCTAGTGTGAGGCTGCACCCCATGTTCCCCAAGTAGGATATGCTTGGGGT
AGCCACAGTAGCTCTGTCTCAGGAGTGAGCCTGCTGTGACCTAAAGCTTCAGAATCAGCTCAAGGATTTTCCTGGAATGGGGAGCAGGCCAGGTTCC
TCCAGGCTCAACCACCTGTTATAGTAGGGTCTTGTTTTGAGGTTTTCTGGTTGGGCAAGGCCCAGGCTTCATCGTGGAGCATTTGGGAGATGAGAGA
TGGCTTCCGGGACTACATAGATGGCTCATGGAGAAAGAGTGCTTGTGGAAACATGAAGCCTGTTTCATGAAAACAGGGTACCTCTAAATGCCCATAA
CCCCAACATTTGGGAGCAGAGACATCTTGAGAGCTCTCTGGCTGGCCAGCCTAGCTAAGATGGCAAAGCATCTGATTCAGTGAGACTCTGTCTCAAA
GGAATAAGATGCGGGGTTGGTAGAGGACACCTGATATCCGTCTCTCCTTCTGCATACACTCTTACACACCTGCATGCAATATACTATGCTCGTTAAA
AAAAAAAAAAAGTGACTTAAGAGAGAAACTTGATTCTGCTTTATCTCTAACCTCCTGTCAGTAATCGTCATTCCTCCCGGGATCAGAGTCTGGCTGG
CCAATCATACAGCATCTCCTATACCTACCCCCCGCCCCCCTTTATGGAAGACCCTATGGGCCAGGCTCACTGGGTTCTATCTTCTACAAATCTTTCT
TTCTAGGAGCCACGTGTGAGGTGGTGTTGGCCCCATGTGCTACCAGCCCCTGCAAAAACAGCGGGGTATGCAAGGAGTCTGAAGACTATGAGAGTTT
TTCCTGTGTCTGTCCCACAGGCTGGCAAGGTGAGGCTTGCCTGGTCCCACCAGGCTGGGACAAGGATGGTGGATGGGAAGTCAGGGGCCCTGGCCAG
CCTGTGGGGCAGTCTCGAGAAAGGAGCCCATCAATGCTGAGCTACCTGCTCTGGGAAGCTCTGGGAAGCTCTGGGAAGCTCTGGGAGCAGGAGATGG
TCCTTCCCATTCCAACTCCATATCCTTCTGTTGCCCAGAGGTCAGGGGAGAAGCTCTGGAGATAAACAGACCAGCTAGGACAGAGGCTCAGAGGGTG
GGGGCAGGTAACCAAATGAGTTTTTTGTCTTCACAGGTCAAACCTGCGAGGTTGACATCAATGAGTGTGTGAAAAGCCCATGTCGCCATGGGGCCTC
CTGCCAGAACACCAATGGCAGCTACCGCTGCCTCTGCCAGGCCGGCTATACAGGTCGCAACTGTGAGAGTGACATCGAATGACTGCCGCCCCAGTAA
GTGGTACCCAGCTCTGTCCATCCTATGTTTGGGTGCCTCTGTTCCTAAGCACACATGACAGGGAGCTGCTGAGAGTCTGAGGTGGAAAATAGCCCTG
GTGCCCGGCAGTCATGAAGGACTGTGGATAGCTGTGCCCTCAGCTTAGTCCACTTGCCTGTGCCTTAAAAAGAGACAGGCCAGAGGCTAGACAGGCC
AGGAGGAGGCTGTTGAGCATCAGTGTGTGCTTCTCACGGGCTTTGCTGCTAGATTTCCCAGCCCAGTTGAGTGATATGGAGCAGAGGCACCAGGCAC
TTCAAAATGATGGCATGGGGCCTAGTTGTATTCAACCTTGACACTCGGCCCTTGTCAGGACCCATTGAGTTGTGTAGGGCTTTAGAGATGCCCTGCA
TCCTGAGTCAAAGCTAAAGGCAGAGAGAGATTGAGGGAGGTTCTGCCTGGCACCATCAGTGTGTGTGTAGGGGAATGGGCTTCCCTATGACTGCCTT
GGGCCTGAGGGAAAAAGTGTATGCGGAGCAGATECCAGGCTCAGTGCTGGGATGGGCCCCTGTTGACTACTGTCATCAAGGCTTGCTGTGAGCACTT
GCCACCCCATACCACCTTCTCAGCATCAGGTCCCCGAAGCATGGCCAGTGGCCACCTAAGGCTCATCTTTCTGTCCCTCCAGACCCGTGTCACAATG
GGGGTTCCTGCACCGATGGCATCAACACAGCCTTCTGCGACTGCCTGCCCGGCTTCCAGGGTGCCTTCTGTGAGGAGGACATCAATGAATGTGCCAG
CAATCCCTGCCAAAATGGTGCCAATTGCACTGACTGTGTGGACAGCTACACATGTACCTGCCCCGTGGGCTTCAATGGCATCCACTGCGAGAACAAC
ACACCTGACTGTACTGAGAGGTGGGTCCCAGCCTCAGCTGAGACAGGGAAAGAAATGGACTGTGGAAGACACAAAGTCTTGACAGCATGGCATCTCA
AGCTGGTGTCTTGCCCAGACCCAGTGGGCATACAGCACTAATTGAACTGAATCCAGCGTTGTTCATTATGTTGCAGTATCCCTCCTAAAGGGGCCTT
TGTGACCTCCAGTGACTTAGAACAAGGAAGTTTGTGCAGAGGAATTGGGGAACTAGCCTCCTATCAAACAAGAGCTTTGTAATCTGTCTTAGTTCCC
CTTTTGCCCTGGTTGCCAGGAAGCTTAGAGTTAAATCAATCTCAAGCCTGGTTTGTGATGCGCTTCCTATAGTGTTCCTATTTTGCCCTTGATTTTG
TTTTTCTCAACCACCACGTGTCTATATGCTATAAAATCTCTGCTCGTGATTTGGGTATTGTGGCCAGGTAGGCATGGAGTTGTCTCTCCTGGCAAGG
ACCTTAGGGAACTCCTCACTCTTCCCTGCTTCTCATCTGCCTCTAGCTCCTGCTTCAATGGTGGTACCTGTGTGGATGGTATCAACTCCTTCACCTG
TCTGTGTCCACCTGGCTTCACGGGCAGCTACTGTCAGTATGATGTCAATGAGTGTGATTCACGGCCCTGTCTGCACGGTGGTACCTGCCAAGACAGC
TATGGTACTTATAAGTGTACCTGCCCACAGGGCTACACTGGTCTCAACTGCCAGGTGAGCTGAGGTTACAGGGTATGACCCAGAAGGCCTAGGGCTC
TCCAGTGCCCATTGCCCAGCCCTGGGCCACACTACCTTCAGAGGGCCAGGGACACAGAAGCAGAGAGGCTCCCTGGTGTCATCATTGGTTGATGAGC
CAGAATGAACCCACATCCTCTGGGAAAATGCCAAGTTGGGTGCTTCTGAGGGAGACAGGTGGGCATGGGTGCCAGCCAGGCTCTTCTGTGGAGTGCA
TTATGTGGCCATCTGTCTGAAGCAGCCTGGGGCAGTGCTCACTTCTGGTGGAGGATGTCCAAGGGGAGGTAGCCAGTGGGTTGTGGAGAGCCTTGAA
AGAGAGCAAGGAAGACGTGGAGCCCAGGCCTATGTTGTTCGGAGGGCGGGCAGTGTTTGTGAGTCCTGTGCCTGGGATTTCTTAGGTGATATTCTTT
CTGAGATGGTGGGGGTGGGGGTGGGGAAGTCAGAGCATAAAATGCCTTATTCCAGTGGCGCTCAGCCTGTGGGTCATGACCCCAATAGGGGTCATAT
ATCAGATATCCTGCATATTTTTGCTACATGACAGTAGCAAAATTACAGTTATGAAGAAGCAATGAAATAATTTTATGGTTGGAGGTCACCACAACAC
GAGGAACTATATTAAAAGACTGCAGCATTAGGAAGGCTGAGAACTGCTGTGCTTCTCAGAGCCAGCCAGGACCAGGGCAGGAGGGTGCCCTAGCAGT
CAGAGTTGGTCAGGGAGAAGCTAACCAGCGCCTGTCTCCTCAGAACCTTGTGCGCTGGTGCGACTCGGCTCCCTGCAAGAATGGTGGCAGGTGCTGG
CAGACCAACACGCAGTACCACTGTGAGTGCCGCAGCGGCTGGACTGGCGTCAACTGCGACGTGCTCAGTGTGTCCTGTGAGGTGGCTGCACAGAAGC
GAGGTAACCAACCGGCCGGGCCCACCTGTCCTTGCTCAGGCTCAGCTTAGGCCAGGAGTGCCCCGGTGCCTGCCAGGTCAGGTGACAATGGGCAGTA
GTCCCGAGAATCGGAGCCCAGGCCTCAGCTCCTTCCCGTCTTGTCCCCACAGGCATTGACGTCACTCTCCTGTGCCAGCATGGAGGGCTCTGTGTGG
ATGAGGGAGATAAACATTACTGCCACTGCCAGGCAGGCTACACGGGCAGCTACTGTGAGGACGAGGTGGACGAGTGCTCACCTAACCCCTGCCAGAA
TGGAGCTACCTGCACTGACTATCTCGGCGGCTTTTCCTGCAAGGTGTGGGCCGTCATGGGGTGGCGGGGAGGGTATCAGCGTGAGTGTTGCTGCAGG
GGAGGGCTTTTGACTGGGAGCTAGTGCATCATGGCAGACTGAGCACATACCTGTGCAGGATCCGGTCACATTACAGATGTGCTGAAGGAGGAGAACT
ATGCCAAGCAGTGGCTTAGGGCACCCCTTTCCTATATGGTTTCATGGTACCTAATACCTGCTCCAAGACCTCATCCCTGGGGGACCAGGTGTTGCCC
CACACACACACACCTTGGACACTTATTTTAACTTACTGGGGTCTACTGGGTGGAGCCCTCGCTGCAGGGTGGGACAGTGTAGTCTAACTGGGTATAT
GGCCTGCATGGCAAGTGGAGGACATGATACCACAACCCCAGCTAAGCTGTGACCTGTGCCATTTCTACAGTGTGTGGCTGGCTACCATGGGTCTAAC
TGCTCCGAGGAGATCAACGAGTGCCTGTCCCAGCCCTGCCAGAATGGGGGTACCTGCATTGATCTGACCAACTCCTACAAGTGTTCCTGCCCCCGGG
GGACACAGGGTAAGGGTAGGGACCTGGATGATGGGCAGGATCCAGCCAGAGATCACTCAGGTGATTGAGAGCTGACCACGGAATAGGAATCTCAGAA
GGGAGGTGGGCTCCAGTGGCACTGTGCTGCCTCCCCCGGGCCCCAGGTCCTAACTGATTTCTGGACTGGGCTGCACAGGACAGAGCACAGTCAGCAT
CATCCGACGGTGTCTCTGGTCACTCTGCAGGTGTACACTGTGAGATCAATGTTGATGACTGCCATCCCCCCCTTGACCCTGCCTCCCGAAGCCCCAA
GTGCTTCAACAATGGCACCTGTGTGGACCAGGTGGGTGGCTATACCTGCACCTGCCCACCAGGCTTCGTCGGGGAGCGGTGTGAGGGTGATGTCAAT
GAATGTCTCTCCAACCCCTGTGACCCACGTGGCACCCAGAACTGTGTGCAGCGTGTTAATGACTTCCACTGCGAGTGCCGGGCTGGCCACACTGGTG
CGTGCCTTGGGCAGGTGGGTCGAACGGGTGGGTGGGCAGGGTCAACAGGGATGGCTCCTTACTGTCCCTTCTTCACACAGGACGCCGCTGTGAGTCA
GTCATCAATGGCTGCAGGGGCAAACCTTGCAAGAATGGGGGTGTCTGTGCCGTGGCCTCCAACACCGCCCGTGGATTCATCTGTAGGTGCCCTGCGG
TAGGTGTCCCTGGCCCTGTGCGGCTGCAAGGGTGCCAGGTCTGAGGGTGCCTGAACCCTGACCGACTCTTATGGTGGATCTGTCCTCCACCCACCCT
CACTGTGAATAGTCAGCCTGAAGACCTCTAGCAGAGGCTAGGGTCCAAGCCACATGCTTCCTCGTGTCCATTCCCCAGCTCGTTTATAAAACCCGAG
CGGGCACGATCCATACATGCCTTGCTCCCAGTGCTCTGCAGCCTCAGGCTGAAAGATTGCCTTGTATTTGAGGTACCTTAGGCTTCACAACAAGACC
CTGTTTAAAAAGTTTATTTCCTGCTGTGCTATGTTGGGAACCTCACACATGCTGGGCAAGTGTTTTGCCACTGTGTCTTAGCCCAATTTTTTAAATA
GATGTTTATTTTAGAGCGGTTTTAGGTTTGCATGAGAACTTAGCAAGAGGGCCAGGTCCCCACCCTGCAGGCCGTTCCCTATGTTTGCTGCCTTGCG
TGGAAGGTGTTGAGCTGGCACTAATATGCAGTATTTGCTCTTGGGTGTTGACATCCAGGGATCTGTACACATACAATGTACCAGCATCAGCCTTGGG
TTTCATGGCTCTAAAAACTCCTAGGGTTCTCCCCATTCACCTATCCCTCCAGTTTGAAGCCCTTGGCAACCCTGACCATCCTATGGTGAGATGTTTC
AAGGGTCTTGTTATTGGGGCAAGGCCATAGACACCTTTCACAGGCCACAGACTGGGGCCAGGTCTTTGCTGGGGTGTGCATGGTGTCCCTGATTGAA
TGCACCATCCTCTCTCCACCACAGGGCTTCGAGGGTGCCACATGTGAGAATGATGCCCGCACTTGTGGCAGCTTACGCTGCCTCAACGGTGGTACAT
GCATCTCGGGCCCACGTAGTCCCACCTGCCTATGCCTGGGATCCTTCACCGGCCCTGAGTGCCAGTTCCCAGCCAGCAGCCCCTGTGTGGGTAGCAA
CCCCTGCTACAATCAGGGCACCTGTGAGCCCACATCCGAGAACCCTTTCTACCGCTGTCTATGCCCTGCCAAATTCAACGGGCTACTGTGCCACATC
CTGGACTACAGCTTCACAGGTGGCGCTGGGCGCGACATTCCCCCACCGCAGATTGAGGAGGCCTGTGAGCTGCCTGAGTGCCAGGTGGATGCAGGCA
ATAAGGTCTGCAACCTGCAGTGTAATAATCACGCATGTGGCTGGGATGGTGGCGACTGCTCCCTCAACTTCAATGACCCCTGGAAGAACTGCACGCA
GTCTCTACAGTGCTGGAAGTATTTTAGCGACGGCCACTGTGACAGCCAGTGCAACTCGGCCGGCTGCCTCTTTGATGGCTTCGACTGCCAGCTCACC
GAGGGACAGTGCAAGTAAGTAAGGCTGAGTTTCTTTAGAGTCCCAGGGCTCAGGATGCTACGGGAGGACCTAACCAAACACCAGGCTCCTGAAGCCA
ATGTCTATCCCTGCCCATTGCGAGTCGCCAAGCACATTTCCCAGATCTGGCCTATTCAAGGTATGGGTTTGAGGTCCACAGGCTGGGATGGGACTGA
GTGCATCCTATACCTCCTCAGCCCCCTGTATGACCAGTACTGCAAGGACCACTTCAGTGATGGCCACTGCGACCAGGGCTGTAACAGTGCCGAATGT
GAGTGGGATGGCCTAGACTGTGCTGAGCATGTACCCGAGCGGCTGGCAGCCGGCACCCTGGTGCTGGTGGTGCTGCTTCCACCCGACCAGCTACGGA
ACAACTCCTTCCACTTTCTGCGGGAGCTCAGCCACGTGCTGCACACCAACGTGGTCTTCAAGCGTGATGCGCAAGGCCAGCAGATGATCTTCCCGTA
CTATGGCCACGAGGAAGAGCTGCGCAAGCACCCAATCAAGCGCTCTACAGTGGGTTGGGCCACCTCTTCACTGCTTCCTGGTACCAGTGGTGGGCGC
CAGCGCAGGGAGCTGGACCCCATGGACATCCGTGGGTGAGTGCTCCAGCTCCTGCTGTTGTGGGCTGTTTCCCAGTGTGTCCCTGGGTTCTCTAACC
AGCTTAACCCTGGAGGTGTAACCTCAGGGGAGGTAGTATTCACCTTATTTTATAGTCAGAAAGCACCTGGGATGAAGAGGGCATCCCTCTGATGAGG
ACTTGGCAGGCCTCAGGGTTTGCCCAGATGTGATTTTCAGGCCCCACTGTGTACCAGGTGTTGGAGACCAAGCTGATTAAAGCCTCCAGGGTGTCCC
CTGGGGCTAAGTCATCCTAGACCAATCCTGACCCTCAGTCACTACAGCCCTTATCCCTACTACAGAGGAGGCAGTGAGGGGTACAGAAGGGCACTGT
TGCTGAGCCTGGAAGGCTGAGGAGCCGAGGGAGGCACAAATAAGAGCATCTCCTGGATGCTGCACAGAGCCATCTGGGGATGGGCAGGGAAGCACCA
GCCAGGCATTTGGAGGTTCCAGGAGCCTTCGCTGTTGGGCATCTGCCTGGTGGCACCTCAGTGTCTCCTGACCCCAGTGGTTCCTGGTCCTGGTTTT
CTTGTCGTGGGACTGTGGTGAAGGTCAGAAATTAATTGTTTCCTGGAGGCTGTTAGAATCCTGTTTCTGAGAGGCCAGTGACTGAGAGTTGGTGACT
TGGCTGGCATGAGAGAGCTGACTCTCTGGCATCTGAGCCTGCTGTCACCTCAAGCTACACCATAGGGAGTCACAACTGCATCCTTGCAGTTCTGTGG
GGCCCCAGGCACTGCTCTCAAGAGGGCATTGGATGCCTAAAGACTATTCTTTGAAGTAAGGAAAAGGGGTGCTGTGCACCTAAGGGGCAAGGCTAGA
CAGTGGAATGACCCCCGCTGAGTGCTAAACACTGGGGCAGCAGGGAGAGTGTCCCATTGCGGGGCTGTCGTCTGATAAGCCCTGTGGGTCAGGGTGA
TGGGCTAGGGAGTCAGAGCTGGTGTGTAGGCAGTGTACTGGGGTGTATCTAATCTCACTGTGCCATGTGTGTTCTCAGCTCCATTGTCTACCTGGAG
ATCGACAACCGGCAATGTGTGCAGTCATCCTCGCAGTGCTTCCAGAGTGCCACCGATGTGGCTGCCTTCCTAGGTGCTCTTGCGTCACTTGGCAGCC
TCAATATTCCTTACAAGATTGAGGCCGTGAAGAGTGAGTAATCAGGGGCTGGAGGGATGGCTCGGTGGTTAAGAGCACTGGCTGCTCTTGCAGAGGA
CAAGGGTTCAAATCCCAGCACCCACGCAGCATCTTATAACTATGTGTAACTCTAATTCCAGGGCATCCAACACTTTCTGACCTCTGCAGGCACCAGG
CATGCACAGGGTCCTGACGTACATGCAGGCAAAACACCCATACACATTACATATTTTTTAAATGAGTTCCCTACCCCGACCAGCCCTGCCTCTTCAG
GGATGGGTTCATTGGGTGGCGGGTCACAGGCAGGCGGTCTCTCACTCCTTGTGCCAGCTGCCATTCCCAGCTCAGGAAGTGCTTTTCTGGAATTTTT
TTCCAAGGCCTTCCCTCCCTGTGGCTAGTGGGAGCCGTAAGTAAAAGCTGTCCCCTAAGATGTATACATATACCAGAAAGTATGGAGGAGTCTTTCT
TCTCTCCTCATTCTTTACCCCTGATTTTTCTTTGTTGGATATTATTTCAAAATCATTACTAGAGTTTTTTTGTGTGTGTTATTTTTTTTAAGAGAGA
GAGAGAATTGATCGGTGTCATGTGAAGTGTTGAAGTTTGTATCTTGAAAATCCCCCTAAATCCTTTGTCTTAACAGCTCAATGCGAGCGCAGTGATT
TGAAGTTCGCTAATCCTCCTTCTCGAAAGGGGAGAAGTGAGCACTGTCTCCAGACAGATCAGCTGGTGCAGGAGAGAATTTAGCGATAGTTTGCAAT
TCTGATTAATCACGTAGAAAATGACCTTATTTTGGGGGGTGGGATGGAGGAGAGTGGGTGAGGAGGCACCGGCCGTGGAGCCAGTCCTCCGCCCCCC
GCCAGCCCACAGCATCACCACGCCTGACGAGGGGTGCTTGCCTGCCGCCCCTGCCCGCAGGTGAGCCGGTGGAGCCTCCGCTGCCCTCGCAGCTGCA
CCTCATGTACGTGGCAGCGGCCGCCTTCGTGCTCCTGTTCTTTGTGGGCTGTGGGGTGCTGCTGTCCCGCAAGCGCCGGCGGCAGCATGGCCAGCTC
TGGTTCCCTGAGGGTTTCAAAGTGTCAGAGGCCAGCAAGAAGAAGCGGAGAGAGCCCCTCGGCGAGGACTCAGTCGGCCTCAAGTGAGTGGACACTG
CTCCCACTGTGTGTGGGTGAGTGAGTGGCAGGGTTGGTGGGGGTGCTTAGCTCCAGAAGGCCCATGGGCCCATCCATCCCTGTCCGTTACCCTAAGC
CCTTCTGCATGTAGAGGATGCCCATATGAGCTGTGGCTTCAGGGCATCTCCTGGAGTACCTGCTCAGTCTCCCTACCCCCATACCCAGGCCCCTGAA
GAATGCCTCAGATGGTGCTCTGATGGACGACAATCAGAACGAGTGGGGAGACGAAGACCTGGAGACCAAGAAGTTCCGGGTGAGTCCCGCAGGCTCC
CAAGCCCCCCCTGGGTGGCACCTCCTGCCTTGGCCCCAAGTGATGAGGCTCTGCTTACTCTGTCCACACTCAGTTTGAGGAGCCAGTAGTTCTCCCT
GACCTGAGTGATCAGACTGACCACAGGCAGTGGACCCAGCAGCACCTGGACGCTGCTGACCTGCGCATGTCTGCCATGGCCCCAACACCGCCTCAGG
GGGAGGTGGATGCTGACTGCATGGATGTCAATGTTCGAGGACCAGGTAAGGCCACTGGAGACACATGCACACATTCCCTAGCATAGACTTAAGAGGC
CAGTAGGACTTGAGGAGGGCTGGGTCACTGAAGGGCTCTGCCAGAGCAGCATCCTGCCCTGAGCTGATCGTCTGGCTCCTCCTGCCCACACAGTATA
CTTTTTCATGAAATGCTGCTTTGCAATAGTCAAAGTGTTAATTTTTTTTTTTTTTTTTGGTCTCAGTTTTTAGTATGCTGGGATTATAGGTGTGTCC
CCATGCCCAGCTAAAGTGTTGACTTTTAAAATTATATGCATATAGGTGTATATAAAGATATCTTTTATTTTATGTGCATGGTTCTGCCTACATATAT
GTCTGTGTAGTGTTTAGATACCCAGTGCCTGTGGGGAGCCTGAAGAGGCCATTGGATCCCCTGAAGCTGCAGTTACAGATGGTAGTGAGCAGCTATA
TGGGTACTAGGGATTGAACTCAGGTCCTCTGGAAGAGAAGCCAGTGCTCTTAACCACTGAGCCATCTCTGCAGCCCTTATTTTATGTTTTAAAGCAT
TTCTTCATTTGAGTGTAAGGGGCACACATGTGCCATAGTACACACGTGGAGGTCAGAGGACTACTTGTATGAGTGTGGGTTCTCTCCTTCTACCATG
TTGGTCCCAGAGTGCCTTCCAGGGAGGCAGCACTGCATCCCTGGGGACTTCATCCGGGGTCCCTTAAACTGCAGGACTGCCTGCCAGGGCTATGGTT
GAATGTTGACCCTCCCTGAGGCTGACACCATCCTTCCCACACCTACCCTTGTTTCTGTCCTCTCTGCAGATGGCTTCACACCCCTCATGATTGCCTC
CTGCAGTGGAGGGGGCCTTGAGACAGGCAACAGTGAAGAAGAAGAAGATGCACCTGCTGTCATCTCTGACTTCATCTACCAGGGCGCCAGCTTGCAC
AACCAGACAGACCGCACCGGGGAGACCGCCTTGCACTTGGCTGCCCGATACTCTCGTTCAGATGCTGCAAAGCGCTTGCTGGAGGCCAGTGCAGATG
CCAACATCCAGGACAACATGGGCCGTACTCCGTTACATGCAGCAGTTTCTGCAGATGCTCAGGGTGTCTTCCAGGTACGCAGCACTGCATCCTTGGA
GCCAGTGACCTCATCAGGTCTGACTGGCATGGACCCTGCAATCTCTAATTCCAAGTGTGACTGGGCAGGGAAACTTGGCACCTCCACACTGCATTTT
GAAGGAAGTCCAGGTACAAAGGGCATCAAGTCCCACCTGTGTTCTCTGAGCAGGCTGGCTGAAGGTGGTCTTGCGGAACCTACAGGGTGAGGCAGGG
CCTCCTTACTCTCAGTAAAACCCTCCCAATCTCAAGGCTATGGCCTTGACTTGAGGTCTCCACCTCCGTGCTAAAACCTTTGCAGACTAACCCTACC
CCATTCAGCTGTGGCTGCAGGCATAGCCCATGGCGGCAGAAAGAGAGCTTTAGAGGCTGCTGGTCCTGGCCTGCAAAGCTATCTCCTGGCTTTGCCT
AGAAGCCTGGAGCCAGCCTGGGTGGATTTAAGGATTTAGCTGCCTGGGTCTGCAGGGACCAACCCTAGTAGTTGCTCCTGCATGTTGCCAGCCAGTG
ACCCCTGCTACCAGACCTGTCCTCTAGGCGGCCCTGGAGCAAACTCCAATGGGGAATAGACCAGGCATCAAAAAGCTTGTCATTTAATCATTTCTTA
ACTTGAACCACACTTTGTCGGTCTGTAGAAGAAATTAAACAAGACAGGGCAATGTACACCTTTTATCCCAGCACTCTAGAATCTGAGAGGATTGTGA
GCATGAGGCTAGCCTGGTCTTCATAGAAAGACCCTATTTCAAAATAGCAAAGAGAGGTTGAGACCAGCCACAGGTTATGTTGACTGCCTGGTGTACA
GCTCTCCACATGGCCTGCCTTGCTTGCATAGACAGATGTGTGTACGTTTTGTAGGAATCCAGGCAGTGCTGTGAATCCTTACCCAGGTCACCAACCC
ACTCCCTCCTCTCACCTTAACAGTTCCAAGTACGGCTATGGGCCATGAGCGGGATTCCTAGCCTGGTTACTCTCCCCTCTCTCCCCCATGCTATGCA
GTTTGATTTCCTCAACCTGGAGGTAGTTCTGGCAACCATAACCAAAAGATGAGGTCCCAGTAGATCCCCCACTGTCACTAGGGACTGGGTAAGAGCC
CCAGCTCTTGCACATGGAATGTAGCTCCTGCCTTCCECAGGGGCTCAGCTGAGCCCAGTCCAGGCATTGGTTTCTGGAGATACAGGCTTGCATTTAG
ATCACCCTGCCTGAACCCATCCCTGCCTTCCAGATCCTGCTCCGGAACAGGGCCACAGATCTGGATGCCCGAATGCATGATGGCACAACTCCACTGA
TCCTGGCTGCGCGCCTGGCCGTGGAGGGCATGCTGGAGGACCTCATCAACTCACATGCTGACGTCAATGCCGTGGATGACCTAGGTAGGCCCGAGCT
ACAGCCCAGCTACCGAGGACATCAGCCAGTGCCTGGTCTGCTCAGCCCCAACCCACTCTCTCCTCTCTTTGCTTCCTTTCCAGGCAAGTCGGCTTTG
CATTGGGCGGCCGCGGTGAACAATGTGGATGCTGCTGTTGTGCTCCTGAAGAACGGAGCCAACAAGGACATGCAGAACAACAAGGTAAGCAGACGGG
CTGCTTAACCGCAGGCGCATGATGGGGACTCCGGGGCACCCATACGTTGACCACTTAGAGGTTTAAGAGTGTCTGGGACAACAGCAGCCTAAAATAA
CCCGTGCTCTTGCTGGAGAGGAGCTGAGGCGTAAGCAGCTGTCCCATGTCACGGTTACTTGAGCCTTGCCTTCTGTCCCCTTCTGTCCCTGGTGGCT
GTGGTGACCCTAGGGGTTCAGGATTGGCCAAGGGGCAGGGATGGGGTGGCCCTGTCTCTTAAGGCCTGCAAGGCTTCTGGCTTGGTCCACCACTACC
ATGCTCCCTCCTTTGGGATAAGAAAACTGCTGAGCTGGGCTGCGTGTCTCCACCTCGCCTCCCAGTGTCTCTGTTTGTGCAGGGCTAGTTGCTTCAT
CAGGACTCTGCTTAGTTGCTCACAGGGCAGAGTTTGTGCCTCCCTTACCAGCTCCACTGCAGGCTGGGAAATGGAGCAGGAGTCAGGTACCTGGAGT
TGCTGTTGGGCACAGGTTCTCCACAGTCCAGGGTGGGCCAGTGGTTATAGAGAATCCAAGCCTGATAGACATTCTGTTGTGGTGTATGATTATGTCT
GCTGGACAGAGCAGACCTGGAAGGAGCTGAGATGCCCTAGCCACTGGTGACCCTTTGGCATGGTAGTACCTTCCCCATGGCCATTCACTTGCCTTAA
AGGTCCCTGAGTCCCAGGATTGCAGTACTTGTGCCTGCATTTTGGGGAGGAAAGCAAAGGGCACACAGTTACATTCTGTTTTCGGCAGTCTGACTCC
ACACAGGGGAAGAAGCCCTATGTATTTATCCCACAGATCTCTGGGGTGTGAGGTGTTAAATCTAGGTTCTCTAAAAAAAGAACTCGGGACCAGCCAT
GTGTGCGTGCTAGCACCGAGAAGCTGAGGCAGGACGATACTGAGTTCCAAGTACGGCTGTGGGCCCTGAGTGAGATTCCTAGCAACATAGGAAGGCC
CCACTATAAATACTCTCTGAGCCTGGTGGTCTAGGATGCTTGGGTCTAGATAGATCTCTCCAGATAAGAGAAGAGAAAGAGGCAGCACCTGCTTCCC
TAGCCCCTCCCCCCAGGCCATCCATCATCAATGACTCAGCAAATTCTACACCTGCCCGCTCCCTCATGTACCTCCTGTCCGTGTCCTACAGGAGGAG
ACTCCCCTGTTCCTGGCCGCCCGTGAGGGCAGCTATGAGACTGCCAAAGTGTTGCTGGACCACTTTGCCAACCGGGACATCACGGATCACATGGACC
GATTGCCGCGGGACATCGCACAGGAGCGTATGCACCACGATATCGTGCGGCTTTTGGATGAGTACAACCTGGTGCGCAGCCCACAGCTGCATGGCAC
TGCCCTGGGTGGCACACCCACTCTGTCTCCCACACTCTGCTCGCCCAATGGCTACCTGGGCAATCTCAAGTCTGCCACACAGGGCAAGAAGGCCCGC
AAGCCCAGCACCAAAGGGCTGGCTTGTGGTAGCAAGGAAGCTAAGGACCTCAAGGCACGGAGGAAGAAGTCCCAGGATGGCAAGGGCTGCCTGTTGG
ACAGCTCGAGCATGCTGTCGCCTGTGGACTCCCTCGAGTCACCCCATGGCTACTTGTCAGATGTGGCCTCGCCACCCCTCCTCCCCTCCCCATTCCA
GCAGTCTCCATCCATGCCTCTCAGCCACCTGCCTGGTATGCCTGACACTCACCTGGGCATCAGCCACTTGAATGTGGCAGCCAAGCCTGAGATGGCA
GCACTGGCTGGAGGTAGCCGGTTGGCCTTTGAGCCACCCCCGCCACGCCTCTCCCACCTGCCTGTAGCCTCCAGTGCCAGCACAGTGCTGAGTACCA
ATGGCACGGGGGCTATGAATTTCACCGTGGGTGCACCGGCAAGCTTGAATGGCCAGTGTGAGTGGCTTCCCCGGCTCCAGAATGGCATGGTGCCCAG
CCAGTACAACCCACTACGGCCGGGTGTGACGCCGGGCACACTGAGCACACAGGCAGCTGGCCTCCAGCATAGCATGATGGGGCCACTACACAGCAGC
CTCTCCACCAATACCTTGTCCCCGATTATTTACCAGGGCCTGCCCAACACACGGCTGGCAACACAGCCTCACCTGGTGCAGACCCAGCAGGTGCAGC
CACAGAACTTACAGCTCCAGCCTCAGAACCTGCAGCCACCATCACAGCCACACCTCAGTGTGAGCTCGGCAGCCAATGGGCACCTGGGCCGGAGCTT
CTTGAGTGGGGAGCCCAGTCAGGCAGATGTACAACCGCTGGGCCCCAGCAGTCTGCCTGTGCACACCATTCTGCCCCAGGAAAGCCAGGCCCTGCCC
ACATCACTGCCATCCTCCATGGTCCCACCCATGACCACTACCCAGTTCCTGACCCCTCCTTCCCAGCACAGTTACTCCTCCTCCCCTGTGGACAACA
CCCCCAGCCACCAGCTGCAGGTGCCAGAGCACCCCTTCCTCACCCCATCCCCTGAGTCCCCTGACCAGTGGTCCAGCTCCTCCCCGCATTCCAACAT
CTCTGATTGGTCCGAGGGCATCTCCAGCCCGCCCACCACCATGCCGTCCCAGATCACCCACATTCCAGAGGCATTTAAATAAACAGAGATGTGGGAT
GCAGGACCCCAGCTTCCGTTCCCAAGCCCTGTTGGGAGTCCTTTCCAGTGCTTCAGGATGCTGGGGCGACCAAAGGAGCCTTTTAAAAAATGTTTTT
ATACAAAATAAGAGGACAAGAATTTCCATTTTTTTTTTTTAGTATTTATTTATGTACTTTTATTTTCCACAGAAACACTGCCTTTTTATTTATATGT
ATTGTTTTCTATGGCACTAGGGAAAAACATATCTGTTCCAAGAAAATAAACTAGTTCTCAGAGCCTTGATTTTCCTGGTCAGGGTGAAGTTCCCTGT
GTGTCTGTAAAATATGAACAAGGATTCATGATTTGTAAATGCTGTTTATTTATTGATTGCTTCTTTCCAAAATCGAAAAGAAAGAAAAAAGAACGTG
ACAGGAGAAGGGAAGCTGGAAACTGCCATGGCCAGAATTGCCCCTCCCCCACACTCACTGCCCCTCCCCCCAGCGTCACCTGGGATTTGCAGATGTG
TTTAGAAACACGCCCAGACCTTGAACCTTGGGTTCATGGATTAGTTTTGTATCTAAAACAGGAAACAAGTCAGATGATGTGGTTTGTACACTTTCTG
TAACCACCAGTGTGGACTTGAAGAAGTGTCCTCAGCATGTGCAGAGTCTACTACCCAGTACCAGTCGTGAGTCTGCAGGCTCCAGTGTTCTGTAGTA
GTGTTTATGGGCCTTGGGAGTACTTCTCCCCTGCCCTGCCCCACTGTCCCCTTCCTGACAACTTGAGCCAGTAAGCCATGCAGGGTGTGGTGCCTCC
TAGAGAAAACACTGCCTGGACTGTTCTGTGCATCCCTCCAAACAGCATCATCCAAATCCAACTGAGGACAGACGGACTGTCCCGGCCTGGGCCTGGG
CTCCTAACACCTGACTGCCAAAGGGCTCCAATGTGCATTGTGGACTCGCCAGAGTAGCCTGCATTGAGACTCCAAGAAAACAGAAGCTATGTGGCCT
CTGATCCCCAAACTGGCCTGGGTGGGGACATGCCTTGAGTGTGCTGGAATGTGGGTGGAGCCTGCTTCTGGGCCACCCCTCCTGGTTCAGGGCTGTG
CTCACAGCAGATTCTTGCAGTATCAAGTATACGCCTGTGGCAGAATAAGTATCTGTAAATACATGTTTAAAGATGGATTTTGTTTAAAAAATCTAAA
GGAACAAGTGTGTCGTGTGTCAAGCTGATGAGGACTGTCAGACTGTGGCTTAGCTCAGTGTGACCCAGACCTTGTGACCTGTAGCTGCCGAACCAGT
AGCTCCTAAGAGCACAACCCAGGATGGCCCATCTGCTGCCCACCAAGTCCCTTTCCAGCCACTGTGTGCTGGGGGCTTTCGGGGGCAGTTGCCCACC
TCCTCAGGGCAGCTCTTTCTGGCCTTTTGGGGGGCAGTGTCTGTGCCATGCCTAATAGATATGACCAGACGCATCCTAAGATGTTCATTCTTACTGT
GTTGTATAAAATAAAGTGTAGTTTACAAAAAAAAGAAACGTAAAAAAAAAAAACTACATGCAAAACTGTAGGTAATGAAAATGATGTATTTTTTTCA
TCTTTTTTTGTTAACTAATTTGCAATAAAAATGATACTGATGGTTGTCCACATTTTGCTAAACTTGGAGTGTGGTTTGGTTCACTTTTTGGGGAGTG
TGACAGAGAAAGGGCCACCCAGCACTGAAATAACCAAATCCAAACCCTCTCTTACACAGAAATACAGAGGTTGCCATAAGGACACACCATTTTCAGA
AGCTGCACAGCGCAGGGCATCAAGGTGGGAAGACAGTTTCCAAAAGAGTTGATGCAGTCCTCTCAGGGATGTGGATCTGATTGATGCCAGCTGTATT
CCTGTGAGCAGCAGAGGAGTGAAGGCACCTTATGTTGTCATAGATGACTATCCTCTGAGCCCAGTAACCCCCAACCTCTTCAAATTCAGCCATGCCT
TGCAAAAGGTCATCCCAGCTGTGCTTGTTGACTGCTTATAGACCCCCTCAAAGAGTTGGGAAGGTCATGGGACTCAAAGGACCCTTGCCTGATGATC
CAGTCACTTTGTTGTATGCAGTCCTGCCCTAATTGTGCATGACCTCAGGGAGGTACTAGAGTATATAGTCTGGGAAGACTAGTGGAGAGACTCCATC
TATGTGGCTGTGAGGAAAGCCTTATCCCTGCTGGGTAAATGTTGTATTAATATTCATTTAATAAAGGCTGGGCGTGGTGGCACACGCCTTTAATCCT
AGCACTCAGGAGGCAGAGGCAGGTGGATTTATGAGTTCGAGGCCAGCCTGGTCTACAGAGTGAGTTCCAGGACAGCCAGGGCTATACAGAGAAACCC
TGTCTCGAAAAACCAAAAAAAAAAAAAAAAAAAAAAAAAAAAAATTCATTTAATAAATCCTGGCAGCAGGTCACTATCCAACTCAATGGTTTATGAA
AGACACACAACCTTTCTTTATATTTTATTATGTCTTATTCAGCACAATAGCTGGGTAGCTGCCTAGCCTCCATATTGCTAAGACTCTGTCTCCCCAT
TCTGAATTCCTGCTTACTAATTCTATGTTCTATCGTGGCTGATCTAGACCAAGTTGGGCAGCCTTATAGGCCATGCTCTCCCAGCTCCTTCAGGTGG
TAGCCTTGCCTCTCTGTCCTGCACTCTTCCCAGGCATGGCATCTCTCCTCTCCCCAACTCTCCCTTCTCCCACTGCCTCAAGTCTCAAGCCCAGGAG
TCCTAAACGGTCCACCTTGTCTGTCCTCCCCAGCTACTGGCTATTGGTATCTTTATTTACCAATCAGAACCCACTGGGGACAGGTTCCCAAAAGCTA
TGTGTAGACCTTCCTGTGCAGTTCGGGGGAACATTAACATTTGTAATACAAACAGCTACAAGTAAAGAGTTCCAATGTGGACTCAGTAAGTAACCCT
TTACCTATGTTCTGCTCTTGTCAGCGCTGCAAATCCATTGGTGCCCTAGTCAGCTTTGGTGCCTAGGACCTTAGGAGGAGGGTTAAGTGTTGTCTCT
TCCTGGGAAGGAATTTTAGCAACACTCATCTAGTCCGAGAGCCCAGCAGGTACAAAGGCATCTTAGCCCTAAGAAGAAATCATAATAGCACAGGTGT
GGATCTCCCTTGGCCTGCTGTACTGGCTAGTTTTGTGTCAACTTGACACAGCTGGAGTTATCACAAAGAAAGGAGTTTCAGTTGGGGAAATGCCTCC
ACGAGATCCAGCTGTAAGGCATTTTCTCTTAGTGATCAAGGGGGGAAGGGCCCTTTGTGGGTGGTACCATCTCTGGGCTGGTAGTCTTGGGTTCTAT
AAGAGAGCAAGCTGAGCAAGCCAGGGGAACCAAGCCAGTAAAGAACATCCCTCCATGGCCTCTGCATCAGTTCCTGCTCCCTGACCTGCTTGAGTTC
CAGTCCTGACTTCCTTGGTGATGAACAGCAGTATGGAAGTGTAAGCCGAATAAACCCTTTCCTCCCCAACTTGTTTCTTGCTCATGATGTTTGTGCA
GGAATAGAAACCCTGACTAAGACACCTGCCTAGGCCTCTCCATTTGGCCCACACCTTGGAGCACAGCAGGAGTCTCTAACCAAAGTGACAATGGGGA
ATGTGATGCCCTCTCTGAGCCTGACATCTGAGGACAAGTGTGAATCCATCAAGTTCAGATGTCTTGCCCCGGCTCAGTGTTGCACACTGTGAAAGCG
GAGGGGGCCCAGGGGCCCAGAAGGGGTGCTCACACACAGAATTGTGATAACTTGTCTCATTCTTGCCCTCAAGGGGAAGGTCGGAGCCTGAATTCTG
CCCGGAGAACTAGCATCTCCAAAATTCCATCCGGAATGGAAATGTCAGCTCGGAAAGGGCTTAGCAGGCTCATATGCCTGGGTGTTCTCTAGAGCAT
CATCCACAATGGCATGTGCAGCCCAGGGTTCACAACTGATGGCTGGACCACTGAGAACACATCTGGACTGGGTTCGGGGTGAAAAACATTGATGTTT
GCAGATCAAAGCAAGGGCCTACCCATGTGGGCAAATCTTCTCCAGTGAGAGACCAAACAACAAAAGGTCAGGGAAGAGGGGATGGATCCTGCCTACT
GCGGCAGAACATGAATCCTCTCCCCTCCAGGCTCCCACGGAAAGATTGCCTGTTCTTGGGTCTCCAGCTTGCCAGGTACAGCTCTGGGGACTTGCCA
ACCCCACAACCTCTCTTTGTATCTACCCTAGTAAACATTCAGTGGAGTATTTTTCAGCCATTAGAAGGAACAAAGCTCTGAGACCTACTAACATGTG
GGTGAGCTGCAGGAGGACACAGGGCTCGTGAAAGACATCTCAAAAATGACCACATGATTTCATCTTTATGAAATGTCCTCAGTAAGTAAAGCCACAA
AGACAGAGAACAGAGTGGCCATTCCTGGGTCCAGGGAAATGGGTATGACTGACAATGCCTATACATTTGACTTTGCATGGATAGTCCAGCACTGTGT
ACGTCTAAGGCAGAAGGCTGCATGGCACTGTGAAGGTCCCAGACCCGTCAATGCTAGAATTCCACAATCTGTGAGTCTACTAAAACTAGCAAAAAAA
AAAAAAAAAAAAAAATCCAAGCAAAATGGGAACTTTCAGAAATTTGTCCCATGGACACAACAAGTTCTCTTTTATTTTGTGACAGGATCTTGCTGGG
TATCCCAGGTTGGCCTCAATCTCACCATCCTCCTGCCTCAATCTCCCAAGTGTTGGGATTCTAGGTGTGTACCACGCCACCCACTTAAACCTAGTAC
TCTTAAGGAGCATCTATCTGCCCCTAAAAGCCACTGGAAATAAATAAAACATGTAAAACAATATTTTTAAAGGGCTAAAGATGTAGCCTAGTAGTAG
AGGGTTTGTTTACTCTGTGCAAGGCTCTGGATTTCATCCCCAGGACCAAATAAAGTAATCAATAAATTGGCTTGAGACAACCTTCAATAAATTCCTT
GTTCTATGAACCTGAGCTCCTCATTTTGAGTCATGTAAAAAAGTTGGGTATGATCATGTGCTGTAATCCCAGCATCTGTGAGATGGGGAGGTAGAGA
TCGGTAGAGTCCTACTTAGCTTTTGTCTAATCAGTGAGTCGCAGGTCCCAGTGAGAGACCTTGTCTCAAAAACTAAAAACAAAAAGGCCGAGGACTG
GGGAGATGGCTCAGATAGTAAAAATTCCTACTGCACTAGCACAAAGACCTGAGTTTGGAATCTCCAGCATCCACATGCTGTCCTGGAATGACCATAC
ATCTGTAATCCTGTGCTGGGGTGGGGAGGGAGACAAGATCCTGGAGCACCACTTGCCTAGCCAATGATCAATCAAGCACTAGGTCCAGTGAGAGAGA
CCCTGCCCCAAAAACCAGGATGGAGTCAGGCATTGTGGCACATGTTTAACCCCAACATTCAGGAGACAGAGGCCCAGGGCTAAAATAGTCTCTGTCT
CAAAAACAAACTAAAAAACCAAGCTGAGAATGAGAATGATACCTTCTGGCTTCCACATGCCATATATACATATACATGCTCACACGCACAGGCACAC
ACATATGCACAGTGTAAGGACTAAATTGGGCACCCAGCAGCTAGACAGCCCAGAGAGAAAATAGAGTCTTGCAGCCTCAGCCTTCCTTTGTTTAGGG
GGGATTACAGGACAGTGGGCCCTGCTGTCTCTCAACAGAAATACTCCAGGACCAAATCCCAAGCAGACAGAGGTATGGAGATGAGCTCTGTGTCATA
CACACACTGAAGATGGTCATATACAGACATGGGAGCAGAGGCAACTGAGTGGTCTTGGAGCAACTTGCCCTGTGGTACCCGGTCACAGACCTCCAGG
ACAAGGAAATTCCTGTGAAATCCAACTGGTGTGGGGCTGTTTACACAGCAACCTGGATAGATTGATCCAGTCTCGGGCTGAGGTGATGTCTTGGATG
CCGAAATCTCTCAGGGACACAGGCCAGTTCAGTTCCCTAGGTACTGCCTTTCCCCCACAATGAAATGCCATCTGTGCTGGCTAGCTGTAACACATCA
ACTTGACACACAAACTACAGAGTTATCTGAGAGGAAGAAACCATAATTGAGAAAATGCCACTGTAAGATCTGGCTGTAAGACATTTTCTTAATTAGT
GATTGATGGAGGAGGGCCAGCTTATGGTCCTGAGTTCTATAAGAAAGTAGGCTGAGCAAGCCATGGGAAACAAGCCAATAAGCAGCACCCCTCCATG
ACCTCTGTCTGTATCAGCTTCTGCCTCTAGGATCCTGCCCTGAGTTCCTGTCCTGACTTTCTTCAGTGATGAACAGTGCTGTCAAAGTGTAAGCCTA
AGAACTCCTTTCCCCTCCAACTTGTTTTTTGGTCGTTGTTTCATCACAGCAATAAAAACCTTAACTAAGACACCACCACTCCCCAGGGATCTGCCAT
CTTGTAATGTTTTTGTTTGTTTTCAATTTAGAAGAATAGTTATTATGTATATACTACTAGAGGGCAGTGAGTTAGGCAGTAGTGAGTAAGCAGGGGC
ACACTACGTCCTCTGGCTGGCTGAACCTTGTGATCCTTCTGCCTCAGCCTCCTGAGTTCTAGGATTGCAGGTATGCCCCACCAGGCTTGACTTTAAG
TCCTACTTTTCAACATTCAAGTATGTAAGTAGTTCCAGACAAGTATGGTAAATCCAACACTCTAGAGGCTGAGGCAGGAGGACTGCCATAAGTTCAA
GGCCAGCCTGAGTTATATAGCTAACTTCTGTTTCAAAAATAACAAAAGCAGATATAAATAACCCGAGAACAGCCTGGTGGTGGTGTTGCACACCCTT
AATCCCAGCACTCAGGAGGCAGGCGGAGGTAAATTTCTTGAGTTCCAGGCCAGCCTGGTCTACAGAGTGAGTTTCAGGACAGCCAGGGCTACAAGGA
GAAACCCTGTCTCAAAAAACTGAAACCAAACCAAATAGCAACAAAAACAAACCCAAGAACTAGTTCTCTTCCTGTCCCAAGTGTCCTTCGCTCCACT
GTCTGTGTATATCTTCAGTATGAGAGAGAAGGGCTTCCTTAGCCTCCTGGGGTCATTCAGAGAAGCCCATTCCAATAGAAATAAGACGGAAACCACA
TAGGTCATTCAAAGTACTTCATAACCCTTAAAAAGGTCAAAGGAGCAGGTGAATTTATTTCAATACTACATCTTGGTTCGTCCAATGAAACCACAGT
TACCACTTAACTAGCAGTCAACACAAGCGAAGTATGAAAAGGACAGAGTTGACATTCTTTGTATTATTATTTGTATTTATTTGCTTATGTATATGTG
TGCTAACACATGCCATACATGTAGAGGTCAGAGGACAAGTGATGAGAGCCAGTCTCTCCCTCTACCATGTGGGTCCTAGGGACTGAACCTGGGTTGT
CCTCCTTGGCAGCAGGCACCCTTACCCACTGTGCCAGCTCACCTGCATTATCACCATCTGCACTGGCCATGCTGAAGGTGCTTAGAGGCCACACATG
GTCAAAATGTCATCCCAGACAGGCTAATCTCCACCAGCACAGATAAACAACCCATGGAGCCAGATGTAGTACTGGGAGCACTGGGGGGCGAAGGGGA
GGACGGTAAAGGCAGGAGGTTCAGGAGTTCTAAGCCAGATCCTGTCTATAAAGATGTAAGCAAAGGAATAAAGAAGGTGAGGGGAGAGACTGCTATG
CTGGTGTTGTTTCTTGTCAAAGGAGGCACCAAATGTGGCTCTGCATTGCTTTGTCCAGCACAAAGAGGGACCCAAGGGTATTAGTGCCATAAACCCA
GCCAAAGCAGCAGGGTTATGCCTACAATCAAAAGTGATGGAGTGCTGCTGTCCTTCTGAGACTCCGGGAACCAGCCAGCCATGAGTCTTGCAAAGTT
TGCTATCAGGGACACTCTATGGGGAGATTTTTACTATGTGACTCCAGACCCCACCCTGTGGAGCTGTGGAGACCCAGGCCAATCCTCAGCTGCATAC
GAGTTAGGAAACAGGGCTCTTTTACTACAGTATCCTCAAGCCCGACTGAGCTATGTGTACTGTGGATTTCGAAAGGTTTGTGTGGAGCTTCTCCAGA
GAATCCCTCTGTTTTGAAGATCAAGGACAGGGATGCTGCTCTCTCCACCTGCACTTTAAAGATGATGTGGTCCTGTCCTAATTCCTGACCACCCTCA
CGGGTGGTGTTCTCATGGACTACCTGGCAGCTGTGGGATAGAAGGTCCCTAGAGTGTCCTCCTGTGTGAGGGGTGACCTCCAAGGTCTATGTGTGGA
TGCTTTGGCCATCTGTGTAGAACTCACTTCTGGTAAGGACCCAGAAATAGCATGGCTATTGTTATCACAATGGATTTTAAGAACATTCCTTAGCAGC
CAAGCCCAGCATACACAGTCACTGGTCACCACAAACTCATTGAGAGATGGTGTCTTAGTTAGGGTTTTACTACTGTGAACAGATATTATGAGCAAGG
CAACTCTTTTTTTTTTAAAGATTTATTTATTATTATATGTAAATACACTGTAGCTGTCTTCAGACATTCCATAGTAGGGCATCAGATCTCATTGTGG
ATGGTTGTGAACTACCATGTGGTTGCTGGGATTTGAACTCAGTACCTTTGGAAGAGCAGTCAGTGCTCTTACCCGCTGAGCCATCTCACTAGCCCTG
ATCAAGGCAACTCTTATAAAAACAACATTTAATTGGGGCTGGCTTACAGGTTCTGAGGTTCAGTCCATTATCATCAAGGCAGGAACATGGCAGCATT
CAGGCAGACATGGTACAGAAGGAGCTGAGAGTTCTACAACTTCATCTGAAGGCCACTAGGAGAAGGCCACTGACTTCCAGGCAGCTAGGACAAGGGT
ATTAAGGCCCACAACCACAGTGACACACCCACTCCAAAAAGGTCACACCTCCTAATAATGCCACTCCCTGGGCTGAGCATATATAAACCATCACAGA
TGGCCAAGAATGGTTGCTTCAATGCTTTTATGTGCACATACCACCTAGAGTGTTCCACAAAGTTCAGGGTTCAGAGCTTTCACACAACTTTGACCTC
AAGGCTTATTTTTAGATTCTAGTGCTTGTGAGATCCATTCTCTACAACACCATGCTATTTCTATGACTATTTCAAATACAAGACTGTGTTATGCCGG
GTGTGGTGGTACATGCCTTTAATCCCAGCACTCAGGAGGCAGAGTCAGCCGGATTTCTGAGTTCGAGGTCAGCCTGGTCTACAAAGTGAGTTCCAGG
ACTTCCAGGGCTACACAGAGAAACCCTGTCTCGAACCCCGAACCCCCCCTCCGCCCCCCAAAAAAGACGACTGTGTTCTGTTTCTCATGAGATTCTT
CTGCATGGGGTGAGCATGCTTTCTACTGGAGCTGTGGACACTCTGGCACTCAGAAACAAGTCTGACCTAAGCTACTTATTTACTCCCCATCAATACA
ATCTTCTTAAGCTGGAAAAGGGAAGGGGAGAGAAAAGGTCTCTGACCTTAGCCTCAGCAGGCCAGGTGGAAGGGGTGACACAGAACAAGGCCCTTTC
CTCTACCTTGAAAGCAATGCCACAGGCTCCCACAAGGTTGAGGATTCTGTCTCTGACCTCAGAGCTTGGAAATCCATTGTCTTCTCTGACTCCAATG
TGCTCAACTCAGAGAGCATTTATGCAGCACCTGCTATCTTTAGTAAGCCCACCCCCTCCAGGGAGTCCAGAAGTAAAGACTTCCCTCTGCGAGGGCT
GCTCTGTGTGTGTGTGTGTGTGTGTGTGTGTGTGTGTGTGGTTAGGGGGGTCTGCAGGGTATGCAACACCTGCACCTAACTCAAGTGAGATAGGATC
TGGAAGGAGCCCTCAATGGATGGATAATTTGTAGGTAGATTTGTAGGTGGCTCTNNNNNNNNNNNNNNNNNNNNNNNNNNNNNNNNNNNNNNNNNNN
NNNNNNNNNNNNNNNNNNNNNNNNNNNNNNNNNNNNNNNNNNNNNNNNNNNNNNNNNNNNNNNNNNNNNNNNNNNNNNNNNNNNNNNNNNNNNNNNN
NNNNNNNNNNNNNNNNNNNNNNNNNNNNNNNNNNNNNNNNNNNNNNNNNNNNNNNNNNNNNNNNNNNNNNNNNNNNNNNNNNNNNNNNNNNNNNNNN
NNNNNNNNNNNNNNNNNNNNNNNNNNNNNNNNNNNNNNNNNNNNNNNNNNNNNNNNNNNNNNNNNNNNNNNNNNNNNNNNNNNNNNNNNNNNNNNNN
NNNNNNNNNNNNNNNNNNNNNNNNNNNNNNNNNNNNNNNNNNNNNNNNNNNNNNNNNNNNNNNNNNNNNNNNNNNNNNNNNNNNNNNNNNNNNNNNN
NNNNNNNNNNNNNNNNNNNNNNNNNNNNNNNNNNNNNNNNNNNNNNNNNNNNNNNNNNNNNNNNNNNNNNNNNNNNNNNNNNNNNNNNNNNNNN
MOUSE SEQUENCE - mRNA
GTGGTGTGCGTCAACGTCCGATCCCCGCCGGCCACCCCAAGAGGCCGCCGCCGGGCTGCGGGCAGCTGGCGAGCAGGCATGCCACGGCTCCTGACGC
CCCTTCTCTGCCTAACGCTGCTGCCCGCGCGCGCCGCAAGAGGCTTGAGATGCTCCCAGCCAAGTGGGACCTGCCTGAATGGAGGTAGGTGCGAAGT
GGCCAGCGGCACTGAAGCCTGTGTTGCCAGCGGCAGCTTTGTGGGCCAACGATGCCAGGACCCCAATCCTTGCCTCAGCACACGGTGTAAGAATGCT
GGAACGTGCTATGTTGTGGACCATGGTGGCATCGTGGACTATGCCTGCAGCTGTCCCCTGGGTTTCTCTGGGCCCCTCTGCCTGACACCTCTGGACA
AGCCCTGCCTGGCCAACCCCTGCCGCAATGGGGGCACCTGTGACCTGCTCACTCTCACAGAGTACAAGTGCCGCTGCTCTCCAGGGTGGTCAGGAAA
ATCATGTCAGCAGGCTGACCCCTGTGCCTCCAACCCCTGTGCCAATGGTGGCCAGTGCCTGCCCTTTGAGTCTTCATACATCTGTCGCTGCCCGCCT
GGCTTCCATGGCCCCACCTGCAGGCAAGATGTTAATGAGTGCAGCCAGAACCCTGGGCTGTGCCGCCATGGAGGCCACTGCCACAATGAGATCGGCT
CCTATCGCTGTGCCTGCTGTGCCACCCATACTGGTCCCCACTGTGAACTGCCCTATGTGCCCTGCAGCCCCTCACCCTGCCAGAATGGAGCAACCTG
CCGTCCTACAGGGGACACCACCCACGAGTGTGCCTGCTTGCCAGGTTTTGCTGGACAGAACTGTGAAGAAAATGTGGATGACTGTCCAGGAAACAAC
TGCAAGAATGGGGGTGCCTGTGTGGACGGCGTGAATACCTACAATTGCCGCTGCCCACCGGAGGTGACGGGTCAGTACTGTACAGAGGATGTGGACG
AATGTCAGCTCATGCCAAATGCCTGCCAGAATGCGGGAACCTGCCACAACACACACGGCGGCTACAACTGTGTGTGTGTCAATGGGTGGACTGGCGA
GGACTGCAGTGAGAACATTGATGACTGTGCCAGTGCCGCCTGTTTCCAGGGTGCCACTTGCCACGACCGTGTGGCTTCCTTCTACTGCGAATGTCCG
CATGGGCGCACAGGTCTGCTGTGCCACCTCAAGCATGCGTGCATCAGCAACCCCTGCAACGAGGGCTCCAACTGTGACACCAACCCTGTCAACGGCA
AACGAATCTGCACCTGCCCCTCGGGGTACACAGGGCCAGCCTGCAGCCAGGACGTGGATGAGTGTGATCTGGGTGCCAACCGTTGTGAGCACGCAGG
CAAATGCCTCAACACACTGGGTTCTTTTCAGTGCCAGTGTCTACAGGGCTACACGGGACCCGGCTGTGAGATTGATGTTAATGAGTGCATCTCCAAC
CCATGTCAGAATGACGCCACTTGCCTGGACCAGATTGGGGAGTTCCAATGCATATGTATGCCAGGTTATGAAGGTGTATACTGTGAAATCAACACGG
ATGAGTGCGCCAGCAGCCCCTGTCTGCACAATGGCCACTGCATGGACAACATCCATGAGTTCCAATGTCAGTGCCCCAAAGGCTTCAACGGGCACCT
GTGCCAGTATGATGTGGATGAGTGTGCCAGCACACCATGCAAGAACGGTGCCAAGTGCCTGGATGGGCCCAACACCTATACCTGCGTGTGTACAGAA
GGTTACACAGGGACCCACTGCGAAGTGGACATTGACGACTCTGACCCTGACCCCTGCCACTATGGTTCCTGTAAGGATCGTGTGGCCACCTTTACCT
GCCTGTGCCAGCCAGGCTACACAGGCCATCACTGTGAGACCAACATCAATGAGTGCCACAGCCAACCGTGCCGCCATGGGGGCACCTGCCAGGACCG
TGACAACTCCTACCTCTGCTTATGCCTCAAGGGAACCACAGGGCCCAACTGTGAGATCAACCTGGATGACTGCGCCAGCAACCCCTGTGACTCTGGC
ACCTGTCTGGACAAGATTGATGGCTACGAATGTGCCTGTGAACCAGGCTACACAGGAAGCATGTGTAACGTCAACATTCACGAATGTGCGGGCAGCC
CCTGCCACAACGGGGGCACTTGTGAGGATGGCATCGCGGGCTTCACTTGCCGCTGCCCCGAGGGCTACCATGACCCCACGTGCCTGTCCCAGGTCAA
CGAGTGCAACAGTAACCCCTGCATCCACGGAGCTTGCCGGGATGGCCTCAATGGGTACAAGTGTGACTGTGCCCCTGGGTGGAGTGGAACAAACTGT
GACATCAACAACAACGAGTGTGAGTCCAACCCTTGTGTCAACGGTGGCACCTGCAAGGACATGACCAGTGGCTACGTATGCACCTGCCGAGAAGGCT
TCAGTGGCCCTAATTGCCAGACCAACATCAACGAATGTGCCTCCAACCCCTGCCTGAACCAGGGGACCTGCATTGATGATGTCGCTGGATACAAGTG
CAACTGTCCTCTGCCATATACAGGAGCCACGTGTGAGGTGGTGTTGCCCCCATGTGCTACCAGCCCCTGCAAAAACAGCGGCGTATGCAAGGAGTCT
GAAGACTATGAGAGTTTCTCCTGTGTCTGTCCCACAGGCTGGCAAGGTCAAACCTGCGAGGTTGACATCAATGAGTGTGTGAAAAGCCCATGTCGCC
ATGGGGCCTCCTGCCAGAACACCAATGGCAGCTACCGCTGCCTCTGCCAGGCCGGCTATACAGGTCGCAACTGTGAGAGTGACATCGATGACTGCCG
CCCCAACCCGTGTCACAATGGGGGTTCCTGCACCGATGGCATCAACACAGCCTTCTGCGACTGCCTGCCCGGCTTCCAGGGTGCCTTCTGTGAGGAG
GACATCAATGAATGTGCCAGCAATCCCTGCCAAAATGGAGCCAATTGCACTGACTGTGTGGACAGCTACACATGTACCTGCCCCGTGGGCTTCAATG
GCATCCACTGCGAGAACAACACACCTGACTGTACTGAGAGCTCCTGCTTCAATGGTGGTACCTGTGTGGATGGTATCAACTCCTTCACCTGTCTGTG
TCCACCTGGCTTCACGGGCAGCTACTGTCAGTATGATGTCAATGAGTGTGATTCACGGCCCTGTCTGCACGGTGGTACCTGCCAAGACAGCTATGGT
ACTTATAAGTGTACCTGCCCACAGGGCTACACTGGTCTCAACTGCCAGAACCTTGTGCGCTGGTGCGACTCGGCTCCCTGGAAGAATGGTGGCAGGT
GCTGGCAGACCAACACGCAGTACCACTGTGAGTGCCGCAGCGGCTGGACTGGCGTCAACTGCGACGTGCTCAGTGTGTCCTGTGAGGTGGCTGCACA
GAAGCGAGGCATTGACGTCACTCTCCTGTGCCAGCATGGAGGGCTCTGTGTGGATGAGGGAGATAAACATTACTGCCACTGCCAGGCAGGCTACACG
GGCAGCTACTGTGAGGACGAGGTGGACGAGTGCTCACCTAACCCCTGCCAGAATGGAGCTACCTGCACTGACTATCTCGGCGGCTTTTCCTGCAAGT
GTGTGGCTGGCTACCATGGGTCTAACTGCTCCGAGGAGATCAACGAGTGCCTGTCCCAGCCCTGCCAGAATGGGGGTACCTGCATTGATCTGACCAA
CTCCTACAAGTGTTCCTGCCCCCGGGGGACACAGGGTGTACACTGTGAGATCAATGTTGATGACTGCCATCCCCCCCTTGACCCTGCCTCCCGAAGC
CCCAAGTGCTTCAACAATGGCACCTGTGTGGACCAGGTGGGTGGCTATACCTGCACCTGCCCACCAGGCTTCGTCGGGGAGCGGTGTGAGGGTGATG
TCAATGAATGTCTCTCCAACCCCTGTGACCCACGTGGCACCCAGAACTGTGTGCAGCGTGTTAATGACTTCCACTGCGAGTGCCGGGCTGGCCACAC
TGGACGCCGCTGTGAGTCAGTCATCAATGGCTGCAGGGGCAAACCTTGCAAGAATGGGGGTGTCTGTGCCGTGGCCTCCAACACCGCCCGTGGATTC
ATCTGTAGGTGCCCTGCGGGCTTCGAGGGTGCCACATGTGAGAATGATGCCCGCACTTGTGGCAGCTTACGCTGTCTCAACGGTGGTACATGCATCT
CGGGCCCACGTAGTCCCACCTGCCTATGCCTGGGATCCTTCACCGGCCCTGAGTGCCAGTTCCCAGCCAGCAGCCCCTGTGTGGGTAGCAACCCCTG
CTACAATCAGGGCACCTGTGAGCCCACATCCGAGAACCCTTTCTACCGCTGTCTATGCCCTGCCAAATTCAACGGGCTACTGTGCCACATCCTGGAC
TACAGCTTCACAGGTGGCGCTGGCCCGGACATTCCCCCACCGCAGATTGAGGAGGCCTGTGAGCTGCCTGAGTGCCAGGTGGATGCAGGCAATAAGG
TCTGCAACCTGCAGTGTAATAATCACGCATGTGGCTGGGATGGTGGCGACTGCTCCCTCAACTTCAATGACCCCTGGAAGAACTGCACGCAGTCTCT
ACAGTGCTGGAAGTATTTTAGCGACGGCCACTGTGACAGCCAGTGCAACTCGGCCGGCTGCCTCTTTGATGGCTTCGACTGCCAGCTCACCGAGGGA
CAGTGCAACCCCCTGTATGACCAGTACTGCAAGGACCACTTCAGTGATGGCCACTGCGACCAGGGCTGTAACAGTGCCGAATGTGAGTGGGATGGCC
TAGACTGTGCTGAGCATGTACCCGAGCGGCTGGCAGCGGGCACCCTGGTCCTGGTGGTGCTGCTTCCACCCGACCAGCTACGGAACAACTCCTTCCA
CTTTCTGCGGGAGCTCAGCCACGTGCTGCACACCAACGTGGTCTTCAAGCGTGATGCGCAAGGCCAGCAGATGATCTTCCCGTACTATGGCCACGAG
GAAGAGCTGCGCAAGCACCCAATCAAGCGCTCTACAGTGGGTTGGGCCACCTCTTCACTGCTTCCTGGTACCAGTGGTGGGCGCCAGCGCAGGGAGC
TGGACCCCATGGACATCCGTGGCTCCATTGTCTACCTGGAGATCGACAACCGGCAATGTGTGCAGTCATCCTCGCAGTGCTTCCAGAGTGCCACCGA
TGTGGCTGCCTTCCTAGGTGCTCTTGCGTCACTTGGCAGCCTCAATATTCCTTACAAGATTGAGGCCGTGAAGAGTGAGCCGGTGGAGCCTCCGCTG
CCCTCGCAGCTGCACCTCATGTACGTGGCAGCGGCCGCCTTCGTGCTCCTGTTCTTTGTGGGCTGTGGGGTGCTGCTGTCCCGCAAGCGCCGGCGCC
AGCATGGCCAGCTCTGGTTCCCTGAGGGTTTCAAAGTGTCAGAGGCCAGCAAGAAGAAGCGGAGAGAGCCCCTCGGCGAGGACTCAGTCGGCCTCAA
GCCCCTGAAGAATGCCTCAGATGGTGCTCTGATGGACGACAATCAGAACGAGTGGGGAGACGAAGACCTGGAGACCAAGAAGTTCCGGTTTGAGGAG
CCAGTAGTTCTCCCTGACCTGAGTGATCAGACTGACCACAGGCAGTGGACCCAGCAGCACCTGGACGCTGCTGACCTGCGCATGTCTGCCATGGCCC
CAACACCGCCTCAGGGGGAGGTGGATGCTGACTGCATGGATGTCAATGTTCGAGGACCAGATGGCTTCACACCCCTCATGATTGCCTCCTGCAGTGG
AGGGGGCCTTGAGACAGGCAACAGTGAAGAAGAAGAAGATGCACCTGCTGTCATCTCTGACTTCATCTACCAGGGCGCCAGCTTGCACAACCAGACA
GACCGCACCGGGGAGACCGCCTTGCACTTGGCTGCCCGATACTCTCGTTCAGATCGTCGAAAGCGCCTTGAGGCCAGTGCAGATGCCAACATCCAGG
ACAACATGGGCCGTACTCCGTTACATGCAGCAGTTTCTGCAGATGCTCAGGGTGTCTTCCAGATCCTGCTCCGGAACAGGGCCACAGATCTGGATGC
CCGAATGCATGATGGCACAACTCCACTGATCCTGGCTGCGCGCCTGGCCGTGGAGGGCATGCTGGAGGACCTCATCAACTCACATGCTGACGTCAAT
GCCGTGGATGACCTAGGCAAGTCGGCTTTGCATTGGGCGGCCGCGGTGAACAATGTGGATGCTGCTGTTGTGCTCCTGAAGAACGGAGCCAACAAGG
ACATCGAGAACAACAAGGAGGAGACTTCCCTGTTCCTGTCGATCCGCCGTGAGAGCTATGAGACTGCCAAAGTGTTGCTGGACCACTTTGCCAACCG
GGACATCACGGATCACATGGACCGATTGCCGCGGGACATCGCACAGGAGCGTATGCACCACGATATCGTGCGGCTTTTGGATGAGTACAACCTGGTG
CGGTCCCCACAGCTGCATGGCACTGCCCTGGGTGGCACACCCACTCTGTCTCCCACACTCTGCTCGCCAAATGGCTACCCTGGCAATCTCAAGTCTG
CCACACAGGGCAAGAAGGCCCGCAAGCCAAGCACCAAAGGGCTGGCTTGTGGTAGCAAGGAAGCTAAGGACCTCAAGGCACGGAGGAAGAGTTCCCA
GGATGGCAAGGGCTGGCTGTTGGACAGCTCGTCGAGCATGCTGTCGCCTGTGGACTCCCTCGAGTCACCCCATGGCTACTTGTCAGATGTGGCCTCG
CACCCCCTCCTCCCCTCCCCATTCCAGCAGTCTCCATCCATGCCTCTCAGCCACCTGCCTGGTATGCCTGACACCCACCTGGGCATCAGCCACTTGA
ATGTGGCAGCCAAGCCTGAGATGGCAGCACTGGCTGGAGGTAGCCGGTTGGCCTTTGAGCACCCCCCGCCACGCCTCTCCCACCTGCCTGTAGCCTC
CAGTGCCTGCACAGTGCTGAGTACCAATGGCACCGGGGCIATGAATTTCACCGTGGGTGCACCGGCAAGCTTGAATGGCCAGTGTGAGTGGCTTCCC
CGGCTCCAGAATGGCATGGTGCCCAGCCAGTACAACCCACTACGGCCGGGTGTGACGCCGGGCACACTGAGCACACAGGCAGCTGGGCTCCAGCATA
GCATGATGGGGCCACTACACAGCAGCCTCTCCACCPATACCTTGTCCCCGATTATTTACCAGGGCCTGCCCAACACACGGCTGGCAACACAGCCTCA
CCTGGTGCAGACCCAGCAGGTGCAGCCACAGAACTTACCACTCCAGCCACAGAACTTACAGCCACCATCACAGCCACACCTCAGTGTGAGCTCGGCA
GCCAATGGGCACCTGGGGCGGAGCTTCTTGAGTGGGGAGCCCAGTCAGGCAGATGTACAACCGCTGGGCCCCAGCAGTCTGCCTGTGCACACCATTC
TGCCCCAGGAAAGCCAGGCCCTACCAACATCACTGCCATCCTCCATGGTCCCACCCATGACCACTACCCAGTTCCTGACCCCTCCATCACAGCACAG
TTACTCCTCCTCCCCTGTGGACAACACCCCCAGCCACCAGCTGCAGGTGCCAGAGCCCACTTTCCTCACCCCATCCCCTGAGTCCCCTGACCAGTGG
TCCAGCTCCTCCCCGCATTCCAACATCTCTGATTGGTCCGAGGGCATCTCCAGCCCGCCCACCACCATGCCGTCCCAGATCACCCACATTCCAGAGG
CATTTAAATAAACAGAGATGTGGGATGCAGGACCCCAGCTTCCGTTCCCAAGCCCTGTTGGAAGTCCTTTCCAGTGCTTCAGGATGCTGGGGCGACC
AAAGGAGCTTTTTAAAAAATGTTTTTATACAAAATAAGAGGACAAGAATTTCATTTTTTTTTTTAGTATTTATTTATGTACTTTTATTTTCCACAGA
AACACTGCCTTTTTATTTATATGTATTGTTTTCTATGGCACTAGGGGAAAAACATATCTGTTCCAAGAAAATAAACTAGTTCTCAGAGCCTTGATTT
TCCTGGTCAGGGTGAAGTTCCCTGTGTGTCTGTAAAATATGAACAAGGATTCATGATTTGTAAATGCTGTTTATTTATTGATTGCTTCTTTCCAAAA
TCGAAAAAAAAAA
MOUSE SEQUENCE - CODING
ATGCCACGGCTCCTGACGCCCCTTCTCTGCCTAACGCTGCTGCCCGCGCGCGCCGCAAGAGGCTTGAGATGCTCCCAGCCAAGTGGGACCTGCCTGA
ATGGAGGTAGGTGCGAAGTGGCCAGCGGCACTGAAGCCTGTGTTGCCAGCGGCAGCTTTGTGGGCCAACGATGCCAGGACCCCAATCCTTGCCTCAG
CACACGGTGTAAGAATGCTGGAACGTGCTATGTTGTGGACCATGGTGGCATCGTGGACTATGCCTGCAGCTGTCCCCTGGGTTTCTCTGGGCCCCTC
TGCCTGACACCTCTGGACAAGCCCTGCCTGGCCAACCCCTGCCGCAATGGGCGCACCTGTGACCTGCTCACTCTCACAGAGTACAAGTGCCGCTGCT
CTCCAGGGTGGTCAGGAAAATCATGTCAGCAGGCTGACCCCTGTGCCTCCAACCCCTGTGCCAATGGTGGCCAGTGCCTGCCCTTTGAGTCTTCATA
CATCTGTCGCTGCCCGCCTGGCTTCCATGGCCCCACCTGCAGGCAAGATGTTAATGAGTGCAGCCAGAACCCTGGGCTGTGCCGCCATGGAGGCCAC
TGCCACAATGAGATCGGCTCCTATCGCIGTGCCTGCTGTGCCACCCATACTGGTCCCCACTGTGAACTGCCCTATGTGCCCTGCAGCCCCTCACCCT
GCCAGAATGGAGCAACCTGCCGTCCTACAGGGGACACCACCCACGAGTGTGCCTGCTTGCCAGGTTTTGCTGGACAGAACTGTGAAGAAAATGTGGA
TGACTGTCCAGGAAACAACTGCAAGAATGGGGGTGCCTGTGTGGACGGCGTGAATACCTACAATTGCCGCTGCCCACCGGAGGTGACGGGTCAGTAC
TGTACAGAGGATGTGGACGAATGTCAGCTCATGCCAAATGCCTGCCAGAATGCGGGAACCTGCCACAACACACACGGCGGCTACAACTGTGTGTGTG
TCAATGGGTGGACTGGCGAGGACTGCAGTGAGAACATTGATGACTGTGCCAGTGCCGCCTGTTTCCAGGGTGCCACTTGCCACGACCGTGTGGCTTC
CTTCTACTGCGAATGTCCGCATGGGCGCACAGGTCTGCTGTGCCACCTCAAGCATGCGTGCATCAGCAACCCCTGCAACGAGGGCTCCAACTGTGAC
ACCAACCCTGTCAACGGCAAACGAATCTGCACCTGCCCCTCGGGGTACACAGGGCCAGCCTGCAGCCAGGACGTGGATGAGTGTGATCTGGGTGCCA
ACCGTTGTGAGCACGCAGGCAAATGCCTCAACACACTGGGTTCTTTTGAGTGCCAGTGTCTACAGGGCTACACGGGACCCGGCTGTGAGATTGATGT
TAATGAGTGCATCTCCAACCCATGTCAGAATGACGCCACTTGCCTGGACCAGATTGGGGAGTTCCAATGCATATGTATGCCAGGTTATGAAGGTGTA
TACTGTGAAATCAACACGGATGAGTGCGCCAGCAGCCCCTGTCTGCACAATGGCCACTGCATGGACAAGATCCATGAGTTCCAATGTCAGTGCCCCA
AAGGCTTCAACGGGCACCTGTGCCAGTATGATGTGGATGAGTGTGCCAGCACACCATGCAAGAACGGTGCCAAGTGCCTGGATGGGCCCAACACCTA
TACCTGCGTGTGTACAGAAGGTTACACAGGGACCCACTGCGAAGTGGACATTGACGAGTGTGACCCTGACCCCTGCCACTATGGTTCCTGTAAGGAT
GGTGTGGCCACCTTTACCTGCCTGTGCCAGCCAGGCTACACAGGCCATCACTGTGAGACCAACATCAATGAGTGCCACAGCCAACCGTGCCGCCATG
GGGGCACCTGCCAGGACCGTGACAACTCCTACCTCTGCTTATGCCTCAAGGGAACCACAGGGCCCAACTGTGAGATCAACCTGGATGACTGCGCCAG
CAACCCCTGTGACTCTGGCACCTGTCTGGACAAGATTGATGGCTACGAATGTGCCTGTGAACCAGGCTACACAGGAAGCATGTGTAACGTCAACATT
GACGAATGTGCGGGCAGCCCCTGCCACAACGGGGGCACTTGTGAGGATGGCATCGCGGGCTTCACTTGCCGCTGCCCCGAGGGCTACCATGACCCCA
CGTGCCTGTCCGAGGTCAACGAGTGCAACAGTAACCCCTGCATCCACGGAGCTTGCCGGGATGGCCTCAATGGGTACAAGTGTGACTGTGCCCCTGG
GTGGAGTGGAACAAACTGTGACATCAACAACAACGAGTGTGAGTCCAACCCTTGTGTCAACGGTGGCACCTGCAAGGACATGACCAGTGGCTACGTA
TGCACCTGCCGAGAAGGCTTCAGTGGCCCTAATTGCCAGACCAACATCAACGAATGTGCCTCCAACCCCTGCCTGAACCAGGGGACCTGCATTGATG
ATGTCGCTGGATACAAGTGCAACTGTCCTCTGCCATATACAGGAGCCACGTGTGAGGTGGTGTTGGCCCCATGTGCTACCAGCCCCTGCAAAAACAG
CGGCGTATGCAAGGAGTCTGAAGACTATGAGAGTTTCTCCTGTGTCTGTCCCACAGGCTGGCAAGGTCAAACCTGCGAGGTTGACATCAATGAGTGT
GTGAAAAGCCCATGTCGCCATGGGGCCTCCTGCCAGAACACCAATGGCAGCTACCGCTGCCTCTGCCAGGCCGGCTATACAGGTCGCAACTGTGAGA
GTGACATCGATGACTGCCGCCCCAACCCGTGTCACAATGGGGGTTCCTGCACCGATGGCATCAACACAGCCTTCTGCGACTGCCTGCCCGGCTTCCA
GGGTGCCTTCTGTGAGGAGGACATCAATGAATGTGCCAGCAATCCCTGCCAAAATGGAGCCAATTGCACTGACTGTGTGGACAGCTACACATGTACC
TGCCCCGTGGGCTTCAATGGCATCCACTGCGAGAACAACACACCTGACTGTACTGAGAGCTCCTGCTTCAATGGTGGTACCTGTGTGGATGGTATCA
ACTCCTTCACCTGTCTGTGTCCACCTGGCTTCACGGGCAGCTACTGTCAGTATGATGTCAATGAGTGTGATTCACGGCCCTGTCTGCACGGTGGTAC
CTGCCAAGACAGCTATGGTACTTATAAGTGTACCTGCCCACAGGGCTACACTGGTCTCAACTGCCAGAACCTTGTGCGCTGGTGCGACTCGGCTCCC
TGCAAGAATGGTGGCAGGTGCTGGCAGACCAACACGCAGTACCACTGTGAGTGCCGCAGCGGCTGGACTGGCGTCAACTGCGACGTGCTCAGTGTGT
CCTGTGAGGTGGCTGCACAGAAGCGAGGCATTGACGTCACTCTCCTGTGCCAGCATGGAGGGCTCTGTGTGGATGAGGGAGATAAACATTACTGCCA
CTGCCAGGCAGGCTACACGGGCAGCTACTGTGAGGACGAGGTGGACGAGTGCTCACCTAACCCCTGCCAGAATGGAGCTACCTGCACTGACTATCTC
GGCGGCTTTTCCTGCAAGTGTGTGGCTGGCTACCATGGGTCTAACTGCTCCGAGGAGATCAACGAGTGCCTGTCCCAGCCCTGCCAGAATGGGGGTA
CCTGCATTGATCTGACCAACTCCTACAAGTGTTCCTGCCCCCGGGGGACACAGGGTGTACACTGTGAGATCAATGTTGATGACTGCCATCCCCCCCT
TGACCCTGCCTCCCGAAGCCCCAAGTGCTTCAACAATGGCACCTGTGTGGACCAGGTGGGTGGCTATACCTGCACCTGCCCACCAGGCTTCGTCGGG
GAGCGGTGTGAGGGTGATGTCAATGAATGTCTCTCCAACCCCTGTGACCCACGTGGCACCCAGAACTGTGTGCAGCGTGTTAATGACTTCCACTGCG
AGTGCCGGGCTGGCCACACTGGACGCCGCTGTGAGTCAGTCATCAATGGCTGCAGGGGCAAACCTTGCAAGAATGGGGGTGTCTGTGCCGTGGCCTC
CAACACCGCCCGTGGATTCATCTGTAGGTGCCCTGCGGGCTTCGAGGGTGCCACATGTGAGAATGATGCCCGCACTTGTGGCAGCTTACGCTGTCTC
AACGGTGGTACATGCATCTCGGGCCCACGTAGTCCCACCTGCCTATGCCTGGGATCCTTCACCGGCCCTGAGTGCCAGTTCCCAGCCAGCAGCCCCT
GTGTGGGTAGCAACCCCTGCTACAATCAGGGCACCTGTGAGCCCACATCCGAGAACCCTTTCTACCGCTGTCTATGCCCTGCCAAATTCAACGGGCT
ACTGTGCCACATCCTGGACTACAGCTTCACAGGTGGCGCTGGCCCGGACATTCCCCCACCGCAGATTGAGGAGGCCTGTGAGCTGCCTGAGTGCCAG
GTGGATGCAGGCAATAAGGTCTGCAACCTGCAGTGTAATAATCACGCATGTGGCTGGGATGGTGGCGACTGCTCCCTCAACTTCAATGACCCCTGGA
AGAACTGCACGCAGTCTCTACAGTGCTGGAAGTATTTTAGCGACGGCCACTGTGACAGCCAGTGCAACTCGGCCGGCTGCCTCTTTGATGGCTTCGA
CTGCCAGCTCACCGAGGGACAGTGCAACCCCCTGTATGACCAGTACTGCAAGGACCACTTCAGTGATGGCCACTGCGACCAGGGCTGTAACAGTGCC
GAATGTGAGTGGGATGGCCTAGACTGTGCTGAGCATGTACCCGAGCGGCTGGCAGCGGGCACCCTGGTCCTGGTGGTGCTGCTTCCACCCGACCAGC
TACGGAACAACTCCTTCCACTTTCTGCGGGAGCTCAGCCACGTGCTGCACACCAACGTGGTCTTCAAGCGTGATGCGCAAGGCCAGCAGATGATCTT
CCCGTACTATGGCCACGAGGAAGAGCTGCGCAAGCACCCAATCAAGCGCTCTACAGTGGGTTGGGCCACCTCTTCACTGCTTCCTGGTACCAGTGGT
GGGCGCCAGCGCAGGGAGCTGGACCCCATGGACATCCGTGGCTCCATTGTCTACCTGGAGATCGACAACCGGCAATGTGTGCAGTCATCCTCGCAGT
GCTTCCAGAGTGCCACCGATGTGGCTGCCTTCCTAGGTGCTCTTGCGTCACTTGGCAGCCTCAATATTCCTTACAAGATTGAGGCCGTGAAGAGTGA
GCCGGTGGAGCCTCCGCTGCCCTCGCAGCTGCACCTCATGTACGTGGCAGCGGCCGCCTTCGTGCTCCTGTTCTTTGTGGGCTGTGGGGTGCTGCTG
TCCCGCAAGCGCCGGCGCCAGCATGGCCAGCTCTGGTTCCCTGAGGGTTTCAAAGTGTCAGAGGCCAGCAAGAAGAAGCGGAGAGAGCCCCTCGGCG
GAAGTTCCGGTTTGAGGAGCCAGTAGTTCTCCCTGACCTGAGTGATCAGACTGACCACAGGCAGTGGACCCAGCAGCACCTGGACGCTGCTGACCTG
CGCATGTCTGCCATGGCCCCAACACCGCCTCAGGGGGAGGTGGATGCTGACTGCATGGATGTCAATGTTCGAGGACCAGATGGCTTCACACCCCTCA
TGATTGCCTCCTGCAGTGGAGGGGGCCTTGAGACAGGCAACAGTGAAGAAGAAGAAGATGCACCTGCTGTCATCTCTGACTTCATCTACCAGGGCGC
CAGCTTGCACAACCAGACAGACCGCACCGGGGAGACCGCCTTGCACTTGGCTGCCCGATACTCTCGTTCAGATCGTCGAAAGCGCCTTGAGGCCAGT
GCAGATGCCAACATCCAGGACAACATGGGCCGTACTCCGTTACATGCAGCAGTTTCTGCAGATGCTCAGGGTGTCTTCCAGATCCTGCTCCGGAACA
GGGCCACAGATCTGGATGCCCGAATGCATGATGGCACAACTCCACTGATCCTGGCTGCGCGCCTGGCCGTGGAGGGCATGCTGGAGGACCTCATCAA
CTCACATGCTGACGTCAATGCCGTGGATGACCTAGGCAAGTCGGCTTTGCATTGGGCGGCCGCGGTGAACAATGTGGATGCTGCTGTTGTGCTCCTG
AAGAACGGAGCCAACAAGGACATCGAGAACAACAAGGAGGAGACTTCCCTGTTCCTGTCGATCCGCCGTGAGAGCTATGAGACTGCCAAAGTGTTGC
TGGACCACTTTGCCAACCGGGACATCACGGATCACATGGACCGATTGCCGCGGGACATCGCACAGGAGCGTATGCACCACGATATCGTGCGGCTTTT
GGATGAGTACAACCTGGTGCGGTCCCCACAGCTGCATGGCACTGCCCTGGGTGGCACACCCACTCTGTCTCCCACACTCTGCTCGCCAAATGGCTAC
CCTGGCAATCTCAAGTCTGCCACACAGGGCAAGAAGGCCCGCAAGCCAAGCACCAAAGGGCTGGCTTGTGGTAGCAAGGAAGCTAAGGACCTCAAGG
CACGGAGGAAGAGTTCCCAGGATGGCAAGGGCTGGCTGTTGGACAGCTCGTCGAGCATGCTGTCGCCTGTGGACTCCCTCGAGTCACCCCATGGCTA
CTTGTCAGATGTGGCCTCGCACCCCCTCCTCCCCTCCCCATTCCAGCAGTCTCCATCCATGCCTCTCAGCCACCTGCCTGGTATGCCTGACACCCAC
CTGGGCATCAGCCACTTGAATGTGGCAGCCAAGCCTGAGATGGCAGCACTGGCTGGAGGTAGCCGGTTGGCCTTTGAGCACCCCCCGCCACGCCTCT
CCCACCTGCCTGTAGCCTCCAGTGCCTGCACAGTGCTGAGTACCAATGGCACCGGGGCTATGAATTTCACCGTGGGTGCACCGGCAAGCTTGAATGG
CCAGTGTGAGTGGCTTCCCCGGCTCCAGAATGGCATGGTGCCCAGCCAGTACAACCCACTACGGCCGGGTGTGACGCCGGGCACACTGAGCACACAG
GCAGCTGGGCTCCAGCATAGCATGATGGGGCCACTACACAGCAGCCTCTCCACCAATACCTTGTCCCCGATTATTTACCAGGGCCTGCCCAACACAC
GGCTGGCAACACAGCCTCACCTGGTGCAGACCCAGCAGGTGCAGCCACAGAACTTACCACTCCAGCCACAGAACTTACAGCCACCATCACAGCCACA
CCTCAGTGTGAGCTCGGCAGCCAATGGGCACCTGGGGCGGAGCTTCTTGAGTGGGGAGCCCAGTCAGGCAGATGTACAACCGCTGGGCCCCAGCAGT
CTGCCTGTGCACACCATTCTGCCCCAGGAAAGCCAGGCCCTACCAACATCACTGCCATCCTCCATGGTCCCACCCATGACCACTACCCAGTTCCTGA
CCCCTCCATCACAGCACAGTTACTCCTCCTCCCCTGTGGACAACACCCCCAGCCACCAGCTGCAGGTGCCAGAGCCCACTTTCCTCACCCCATCCCC
TGAGTCCCCTGACCAGTGGTCCAGCTCCTCCCCGCATTCCAACATCTCTGATTGGTCCGAGGGCATCTCCAGCCCGCCCACCACCATGCCGTCCCAG
ATCACCCACATTCCAGAGGCATTTAAATAA
HUMAN SEQUENCE - GENOMIC
CAGGCCAGGGAGATAATGGGGGACAGGGAAGATAACGCAGTCCCCACGGCTATAAACAGGAAGCTCGGCCATGGGCTTGTGCAGAAAAAGGCCCTCG
GCTGTGCACGTGGTTCCTACATAGCCTTTGCCAGACACCCTGCGTGGCCCTGGAGGTCTCCAGGCCGTGCCCCGTGCCCCGACACGCAGGATGTGCT
GGGGGCCTGGGCCTGTCCCCTCCATCGCAGCCCTTGTTTGTTGGCCTCCCGTGATGGGCGTTTGCTGCCTGTGACACGGAGCCCCAGGATTAGTTTC
AGGCCTCGGTCTCAGGCCAGGGCCTTTCCTCGTCACCCAGAGATGAGGGGGCTTGCGTCCGGGGTGGGCCCAGGTCCCTGCAGTGTCGTGGAGCCCA
CCCGACTGAGGCCGCCTCTCCTGGTGCAGTCCTTGTTCCTGGGCACGCCTGGTGGGGTGAGGCCTAGGCTGTGCCCCGCTGCCAACCGGGAATGAGG
GGTGGCTTCTGAGCGTGACATTTGTGCAGCTTGTCTTCAGCGTCCCCCCATCTGTGCTCCACTCCTCCCTGGGTCAGGGTCCTGGCACAGCCGGGAG
CGCTCAGGGGTCTCGGTGCACATTTGCCTCCCGGCGGGACCAGCAGACGGCACTCTGATGGCGGAAAGACCAGCAGGCGGTGGCCGATTTGGGAGAT
CCCTCTGGGTGAGGCTCCCGGGGTCACGTGTGTCTCCTTCCCGCAGGTGCCACGTGTGAGGTGGTGCTGGCCCCGTGTGCCCCCAGCCCCTGCAGAA
ACGGCGGGGAGTGCAGGCAATCCGAGGACTATGAGAGCTTCTCCTGTGTCTGCCCCACGGGCTGGCAAGGTGAGGCTGGCCAGGGCCCGGTGAGGGC
TGGGATGGGAGGTCAGGATGTCTGCGGGACACAGGCAGCTCCCAGGCAGGCTAGATGAGTCTTTGAAGAGGAGCCGGTGGGTGCTGAGGAGGCCCTG
GTCGGAGAAGTTCTGGAATCAGGAATTGACCTGGGAGCACCGTTCCCAACTCCAGTTCCTGTGACCTTCTTAGGCCAAAATTAGGGGAGAGGGGATG
GTCCTGGGGTCACGGAAGCCCACTCCTGGGTCGGGAGAGGCACTGTAGGTGGGTGGGCCAGCCTGGGAAGGGCCTGGAGGGCCAGGGGCCGCTGGTG
ACCAACCGGCCTCCTCCTGCCCCACAGGGCAGACCTGTGAGGTCGACATCAACGAGTGCGTTCTGAGCCCGTGCCGGCACGGCGCATCCTGCCAGAA
CACCCACGGCGGCTACCGCTGCCACTGCCAGGCCGGCTACAGTGGGCGCAACTGCGAGACCGACATCGACGACTGCCGGCCCAGTGAGTAGCCCCGC
GGCTCTGGCCTCCTCCAGGAAGCTCTCAGGCCTCAGTTCCCCCGGGCAGGGTTGGTGCGCATGGTGCTGGCCATAAGCACCCAGGGAGGCCGGAGTG
TGGCCGGGGAGGGTTGGGTCAGGTGTGGGGGATGTGCTGAGGGATGGCCAGGGTGGTTCAGGAGGGCCCCAGAGCCGGCTTGCTCCTCCCTGCACTT
CGCGGAAGAGTCACGAGAGCCCCTCCCACGGCTCTTCACTGAGCCGAGGATGGCTCGGGCCCGGCCTGCACTCCCGCCTGGCTCATCGGGCCCCGCT
GCAGGCCAGGGCTCTCAGGCCTCCCAGCCCTGCTTCACAGAGGTTGAGGTTGGCAGAAGCCGGGGGTCTTGCTGGCATCACCTGGCAGGCAGAGGCA
AGAACTGTCTCTCCTCCCCTGCTCGGTCTGTGAAGCCTGCAAAGCTGCCCCCTGCCCTGGAGCTTGAGGACAGGAGCAGGTGGGGAGAGAGACCCCA
AGCACAGGAGACGGGTGTGACGCAGCCTGTGGGTGCTGGGGCTCCCCACCAGACACCTTTGTCACAGGGCTGCTTGCCGCAGCCTCGGCAACGAAAG
GCTGGGCTGTCCCCAGCCATGCAGCCTTCCCGGCCCCCTCCCGCAGGTGTGGGTTTGTGCCTGCCCCTCACACTCACCCTTCCGTCCTCTCCCAGAC
CCGTGTCACAACGGGGGCTCCTGCACAGACGGCATCAACACGGCCTTCTGCGACTGCCTGCCCGGCTTCCGGGGCACTTTCTGTGAGGAGGACATCA
ACGAGTGTGCCAGTGACCCCTGCCGCAACGGGGCCAACTGCACGGACTGCGTGGACAGCTACACGTGCACCTGCCCCGCAGGCTTCAGCGGGATCCA
CTGTGAGAACAACACGCCTGACTGCACAGAGAGGTGTGCGGGGCTCGAGTGAGGCCGTGGAAGGGAACGGGCGGTGCGGGCCACACGCAGTAGCTGG
CAGCCTGGCACACCATGCAGGCGTCCGCCTAGGCCGGCTGGGCACTTAGCGCTGGCTGCATTGAGTCCAGACATTGTTCATTGTACCGACCTGTCCC
TCCTGAGAGGGCCATTGTGACCTCCTCCTGTGTCCCGCACCAGGAGCGCCGGTAGTCTGTCCTGAAGAACTGGTGCGCTTCCTTCTATTAGACAACG
AGAACTCTGTCCGTTCTTGTTTCCTTTTTGCCGTGTTTGCCAGGAAGCTCATTTGGTAAACGTCAGTCTCGTCCCTGGTTTCTGACGTAATTACCTC
CCGTGTTACCAGGACGGTTTCTGGTTTCTCCCTCATTTACTTTAACCACCCTATGCCCACGCGTTTGGTAAAACCACTCTCGACCTGACTTATAAAG
AAAGCAGGGGAGGGAGGTGTGACGTGGTGTGAGAGCCGGGCCCCGGGTTCCCACTGGCCTCCCTGGGTCAGCCAGGCTGCCCTGGGCCTGTCCTGGC
CATCAGGCCCCTAGGGTTGAGCAGAAGGGGAGGTGCTGGCGAGGCAGAATCTGCTGGAGCGGGGACCCACCAATGCCCTCCGCTCAGCCCCCGCCTG
CCCACCCCCTTGCAGCTCCTGCTTCAACGGTGGCACCTGCGTGGACGGCATCAACTCGTTCACCTGCCTGTGTCCACCCGGCTTCACGGGCAGCTAC
TGCCAGCACGATGTCAATGAGTGCGACTCACAGCCCTGCCTGCATGGCGGCACCTGTCAGGACGGCTGCGGCTCCTACAGGTGCACCTGCCCCCAGG
GCTACACTGGCCCCAACTGCCAGGTGAGTGCGCCGGCCACAGAGGTGCCCGAAGGAGGGGCCCTGGGTGGGTGCCTGCCTGCGGGAGGTGGGAACGG
TCACCCCCAGGTCCCACTGTGTCGGCTCGGGGTCACCCCCACACCCCCGGGCAGAGGGTTTCTGGGGATCTGAGCAGCCGGTGAAGGAACCTGATGC
GGAAGCAGCAGGCACCTTCGTTTCAATCCCAGGTTTCTGGAGCCGGGGCGGGAGCTCAGGAATTGGGGAATTGAGGAAAAGTGTTCCTTCTAGCAAA
GGCCGAGGGTGGTCTGGACCTGCTGAGGGCCCTGAGGGAGACCCAGCCCAGGCTGTTCCTGGTGTGGGGGTGGTGGGGAGTCCAGGGGCGGCAGTCT
CCACTTCTGTAGAATGGGTTGCAGCCTGGGTTGGAGTAGGCCCCTTGGCGGATGTGCGTTCTGAGCTACCGGGGAAATGGCCGGGGCGCGGGCACCC
AGCTGACCCCAATCTGTCCCCAGAACCTTGTGCACTGGTGTGACTCCTCGCCCTGCAAGAACGGCGGCAAATGCTGGCAGACCCACACCCAGTACCG
CTGCGAGTGCCCCAGCGGCTGGACCGGCCTTTACTGCGACGTGCCCAGCGTGTCCTGTGAGGTGGCTGCGCAGCGACAAGGTAACCTGCTGTGCCCA
CCCGGCTCGGGTCCCAGCCCATCAAGGTCCTCTGTGGGCCTGGGCCTCACCTGTCTACCACCCCATCCCCCGCAGGTGTTGACGTTGCCCGCCTGTG
CCAGCATGGAGGGCTCTGTGTGGACGCGGGCAACACGCACCACTGCCGCTGCCAGGCGGGCTACACAGGCAGCTACTGTGAGGACCTGGTGGACGAG
TGCTCACCCAGCCCCTGCCAGAACGGGGCCACCTGCACGGACTACCTGGGCGGCTACTCCTGCAAGGTGGGGGTCCCTCCTAGGGTAAGGGTTGTGG
CCGGCACGAGTGTTGCCACACACCAGGCCCTGGCTGGGAGCTGGCCCAGTGGAGAAAACTGAACCTGATAGGCCCATGCACTGTTCAGTCTCATTAG
GGGAGGGCTGGGGTAATCAGGGTAGACTGCCTGGAAGAGGTGGCCTGTGGAAAGCCTGAAGGAGGGTACCTATACTGAGAAGTGGGATGGGGTTTTC
CCTTCCCCTAGATTGTGTCTGGGCTTGGCCAACACCTACCCTGAGGCCCTCACCTCTATCCTATGGGACGGGGTCCACCCACCCCCAACAGGCAGTG
ACTCCGGTCACCGAGGCCCCGCCAGGGTCTGTTGGGCTGGGTCTCTCTCCAGGTCTGACAGGAGCGAGGGGCCCGTGGCTTCGCTGGACCTGAGGGC
AGCTCATGTGGCCCTGTCAGCCCTCACAGTGGGGTGTGGGAGCACTGCATCCTGGCGCCGGCTGAGCCGAAGGGCCCCTCGTTCTGTCGCCTGCACA
GTGCGTGGCCGGCTACCACGGGGTGAACTGCTCTGAGGAGATCGACGAGTGCCTCTCCCACCCCTGCCAGAACGGGGGCACCTGCCTCGACCTCCCC
AACACCTACAAGTGCTCCTGCCCACGGGGCACTCAGGGTAAGGGCCGCTGCACGGAGGGCTGGTGTTGGCCATCCATGGCCAGGGCAGGGGCAGGGC
AGGCACCCCGGGACCGGCCAGAGGCATCCAGGAACCAGCCAGAAACTCCCGTTTTCCTGTGTGAGGCCAAGGCCGACTCACAGCTGCCCAGGGAAAG
GGCCCAGAGCGGGGGTCCCAGTGGGAAGGGCGTCTCCACGGCACCCTTGACACCTGCCTCTCCCGAGTGTCCGTGCAGCCCCAGACCTGAGCGCTTG
TCTTCCGGGACGGACACGCGGCACGGCAGGGCCGGGGTGTGGCGGGCTTGGGCCACTGACGAAACCTGGCCCCGCAGGTGNNNNNNNNNNNNNNNNN
NNNNNNNNNNNNNNNNNNNNNNNNNNNNNNNNNNNNNNNNNNNNNNNNNNNNNNNNNNNNNNNNNNNNNNNNNNNNNNNNNNNNNNNNNNNNNNNNN
NNNNNNNNNNNNNNNNNNNNNNNNNNNNNNNNNNNNNNNNNNNNNNNNNNNNNNNNNNNNNNNNNNNNNNNNNNNNNNNNNNNNNNNNNNNNNNNNN
NNNNNNNNNNNNNNNNNNNNNNNNNNNNNNNNNNNNNNNNNNNNNNNNNNNNNNNNNNNNNNNNNNNNNNNNNNNNNNNNNNNNNNNNNNNNNNNNN
NNNNNNNNNNNNNNNNNNNNNNNNNNNNNNNNNNNNNNNNNNNNNNNNNNNNNNNNNNNNNNNNNNNNNNNNNNNNNNNNNNNNNNNNNNNNNNNNN
NNNNNNNNNNNNNNNNNNNNNNNNNNNNNNNNNNNNNNNNNNNNNNNNNNNNNNNNNNNNNNNNNNNNNNNNNNNNNNNNNNNNNNNNNNNNNNNNN
NNNNNNNNNNNNNNNNNNNNNNNNNNNNNNNNNNNNNNNNNNNNNNNNNNNNNNNNNNNNNNNNNNNNNNNNNNNNNNNNNNNNNNNNNNNNNNNNN
NNNNNNNNNNNNNNNNNNNNNNNNNNNNNNNNNNNNNNNNNNNNNNNNNNNNNNNNNNNNNNNNNNNNNNNNNNNNNNNNNNNNNNNNNNNNNNNNN
NNNNNNNNNNNNNNNNNNNNNNNNNNNNNNNNNNNNNNNNNNNNNNNNNNNNNNNNNNNNNNNNNNNNNNNNNNNNNNNNNNNNNNNNNNNNNNNNN
NNNNNNNNNNNNNNNNNNNNNNNNNNNNNNNNNNNNNNNNNNNNNNNNNNNNNNNNNNNNNNNNNNNNNNNNNNNNNNNNNNNNNNNNNNNNNNNNN
NNNNNNNNNNNNNNNNNNNNNNNNNNNNNNNNNNNNNNNNNNNNNNNNNNNNNNNNNNNNNNNNNNNNNNNNNNNNNNNNNNNNNNNNNNNNNNNNN
NNNNNNNNNNNNNNNNNNNNNNNNNNNNNNNNNNNNNNNNNNNNNNNNNNNNNNNNNNNNNNNNNNNNNNNNNNNNNNNNNNNNNNNNNNNNNNNNN
NNNNNNNNNNNNNNNNNNNNNNNNNNNNNNNNNNNNNNNNNNNNNNNNNNNNNNNNNNNNNNNNNNNNNNNNNNNNNNNNNNNNNNNNNNNNNNNNN
NNNNNNNNNNNNNNNNNNNNNNNNNNNNNNNNNNNNNNNNNNNNNNNNNNNNNNNNNNNNNNNNNNNNNNNNNNNNNNNNNNNNNNNNNNNNNNNNN
NNNNNNNNNNNNNNNNNNNNNNNNNNNNNNNNNNNNNNNNNNNNNNNNNNNNNNNNNNNNNNNNNNNNNNNNNNNNNNNNNNNNNNNNNNNNNNNNN
NNNNNNNNNNNNNNNNNNNNNNNNNNNNNNNNNNNNNNNNNNNNNNNNNNNNNNNNNNNNNNNNNNNNNNNNNNNNNNNNNNNNNNNNNNNNNNNNN
NNNNNNNNNNNNNNNNNNNNNNNNNNNNNNNNNNNNNNNNNNNNNNNNNNNNNNNNNNNNNNNNNNNNNNNNNNNNNNNNNNNNNNNNNNNNNNNNN
NNNNNNNNNNNNNNNNNNNNNNNNNNNNNNNNNNNNNNNNNNNNNNNNNNNNNNNNNNNNNNNNNNNNNNNNNNNNNNNNNNNNNNNNNNNNNNNNN
NNNNNNNNNNNNNNNNNNNNNNNNNNNNNNNNNNNNNNNNNNNNNNNNNNNNNNNNNNNNNNNNNNNNNNNNNNNNNNNNNNNNNNNNNNNNNNNNN
NNNNNNNNNNNNNNNNNNNNNNNNNNNNNNNNNNNNNNNNNNNNNNNNNNNNNNNNNNNNNNNNNNNNNNNNNNNNNNNNNNNNNNNNNNNNNNNNN
NNNNNNNNNNNNNNNNNNNNNNNNNNNNNNNNNNNNNNNNNNNNNNNNNNNNNNNNNNNNNNNNNNNNNNNNNNNNNNNNNNNNNNNNNNNNNNNNN
NNNNNNNNNNNNNNNNNNNNNNNNNNNNNNNNNNNNNNNNNNNNNNNNNNNNNNNNNNNNNNNNNNNNNNNNNNNNNNNNNNNNNNNNNNNNNNNNN
NNNNNNNNNNNNNNNNNNNNNNNNNNNNNNNNNNNNNNNNNNNNNNNNNNNNNNNNNNNNNNNNNNNNNNNNNNNNNNNNNNNNNNNNNNNNNNNNN
NNNNNNNNNNNNNNNNNNNNNNNNNNNNNNNNNNNNNNNNNNNNNNNNNNNNNNNNNNNNNNNNNNNNNNNNNNNNNNNNNNNNNNNNNNNNNNNNN
NNNNNNNNNNNNNNNNNNNNNNNNNNNNNNNNNNNNNNNNNNNNNNNNNNNNNNNNNNNNNNNNNNNNNNNNNNNNNNNNNNNNNNNNNNNNNNNNN
NNNNNNNNNNNNNNNNNNNNNNNNNNNNNNNNNNNNNNNNNNNNNNNNNNNNNNNNNNNNNNNNNNNNNNNNNNNNNNNNNNNNNNNNNNNNNNNNN
NNNNNNNNNNNNNNNNNNNNNNNNNNNNNNNNNNNNNNNNNNNNNNNNNNNNNNNNNNNNNNNNNNNNNNNNNNNNNNNNNNNNNNNNNNNNNNNNN
NNNNNNNNNNNNNNNNNNNNNNNNNNNNNNNNNNNNNNNNNNNNNNNNNNNNNNNNNNNNNNNNNNNNNNNNNNNNNNNNNNNNNNNNNNNNNNNNN
NNNNNNNNNNNNNNNNNNNNNNNNNNNNNNNNNNNNNNNNNNNNNNNNNNNNNNNNNNNNNNNNNNNNNNNNNNNNNNNNNNNNNNNNNNNNNNNNN
NNNNNNNNNNNNNNNNNNNNNNNNNNNNNNNNNNNNNNNNNNNNNNNNNNNNNNNNNNNNNNNNNNNNNNNNNNNNNNNNNNNNNNNNNNNNNNNNN
NNNNNNNNNNNNNNNNNNNNNNNNNNNNNNNNNNNNNNNNNNNNNNNNNNNNNNNNNNNNNNNNNNNNNNNNNNNNNNNNNNNNNNNNNNNNNNNNN
NNNNNNNNNNNNNNNNNNNNNNNNNNNNNNNNNNNNNNNNNNNNNNNNNNNNNNNNNNNNNNNNNNNNNNNNNNNNNNNNNNNNNNNNNNNNNNNNN
NNNNNNNNNNNNNNNNNNNNNNNNNNNNNNNNNNNNNNNNNNNNNNNNNNNNNNNNNNNNNNNNNNNNNNNNNNNNNNNNNNNNNNNNNNNNNNNNN
NNNNNNNNNNNNNNNNNNNNNNNNNNNNNNNNNNNNNNNNNNNNNNNNNNNNNNNNNNNNNNNNNNNNNNNNNNNNNNNNNNNNNNNNNNNNNNNNN
NNNNNNNNNNNNNNNNNNNNNNNNNNNNNNNNNNNNNNNNNNNNNNNNNNNNNNNNNNNNNNNNNNNNNNNNNNNNNNNNNNNNNNNNNNNNNNNNN
NNNNNNNNNNNNNNNNNNNNNNNNNNNNNNNNNNNNNNNNNNNNNNNNNNNNNNNNNNNNNNNNNNNNNNNNNNNNNNNNNNNNNNNNNNNNNNNNN
NNNNNNNNNNNNNNNNNNNNNNNNNNNNNNNNNNNNNNNNNNNNNNNNNNNNNNNNNNNNNNNNNNNNNNNNNNNNNNNNNNNNNNNNNNNNNNNNN
NNNNNNNNNNNNNNNNNNNNNNNNNNNNNNNNNNNNNNNNNNNNNNNNNNNNNNNNNNNNNNNNNNNNNNNNNNNNNNNNNNNNNNNNNNNNNNNNN
NNNNNNNNNNNNNNNNNNNNNNNNNNNNNNNNNNNNNNNNNNNNNNNNNNNNNNNNNNNNNNNNNNNNNNNNNNNNNNNNNNNNNNNNNNNNNNNNN
NNNNNNNNNNNNNNNNNNNNNNNNNNNNNNNNNNNNNNNNNNNNNNNNNNNNNNNNNNNNNNNNNNNNNNNNNNNNNNNNNNNNNNNNNNNNNNNNN
NNNNNNNNNNNNNNNNNNNNNNNNNNNNNNNNNNNNNNNNNNNNNNNNNNNNNNNNNNNNNNNNNNNNNNNNNNNNNNNNNNNNNNNNNNNNNNNNN
NNNNNNNNNNNNNNNNNNNNNNNNNNNNNNNNNNNNNNNNNNNNNNNNNNNNNNNNNNNNNNNNNNNNNNNNNNNNNNNNNNNNNNNNNNNNNNNNN
NNNNNNNNNNNNNNNNNNNNNNNNNNNNNNNNNNNNNNNNNNNNNNNNNNNNNNNNNNNNNNNNNNNNNNNNNNNNNNNNNNNNNNNNNNNNNNNNN
NNNNNNNNNNNNNNNNNNNNNNNNNNNNNNNNNNNNNNNNNNNNNNNNNNNNNNNNNNNNNNNNNNNNNNNNNNNNNNNNNNNNNNNNNNNNNNNNN
NNNNNNNNNNNNNNNNNNNNNNNNNNNNNNNNNNNNNNNNNNNNNNNNNNNNNNNNNNNNNNNNNNNNNNNNNNNNNNNNNNNNNNNNNNNNNNNNN
NNNNNNNNNNNNNNNNNNNNNNNNNNNNNNNNNNNNNNNNNNNNNNNNNNNNNNNNNNNNNNNNNNNNNNNNNNNNNNNNNNNNNNNNNNNNNNNNN
NNNNNNNNNNNNNNNNNNNNNNNNNNNNNNNNNNNNNNNNNNNNNNNNNNNNNNNNNNNNNNNNNNNNNNNNNNNNNNNNNNNNNNNNNNNNNNNNN
NNNNNNNNNNNNNNNNNNNNNNNNNNNNNNNNNNNNNNNNNNNNNNNNNNNNNNNNNNNNNNNNNNNNNNNNNNNNNNNNNNNNNNNNNNNNNNNNN
NNNNNNNNNNNNNNNNNNNNNNNNNNNNNNNNNNNNNNNNNNNNNNNNNNNNNNNNNNNNNNNNNNNNNNNNNNNNNNNNNNNNNNNNNNNNNNNNN
NNNNNNNNNNNNNNNNNNNNNNNNNNNNNNNNNNNNNNNNNNNNNNNNNNNNNNNNNNNNNNNNNNNNNNNNNNNNNNNNNNNNNNNNNNNNNNNNN
NNNNNNNNNNNNNNNNNNNNNNNNNNNNNNNNNNNNNNNNNNNNNNNNNNNNNNNNNNNNNNNNNNNNNNNNNNNNNNNNNNNNNNNNNNNNNNNNN
NNNNNNNNNNNNNNNNNNNNNNNNNNNNNNNNNNNNNNNCCCGGGCCAGGGGTCTCTGGGGGCTTCCTAGGGAGCTCGCTCAGCCTCACTTCTCGAC
CCCTCACCCCCCAGGCCCCTGAAGAACGCTTCAGACGGTGCCCTCATGGACGACAACCAGAATGAGTGGGGGGACGAGGACCTGGAGACCAAGAAGT
TCCGGGTGAGTCGCGAGGCTCCCGGGCTCCTGGGCTCCCGGGCACCTGCTGCCGGGCTGCCCTGACAGGCTCTGCTCACTCCCTCTATGTAGTTCGA
GGAGCCCGTGGTTCTGCCTGACCTGGACGACCAGACAGACCACCGGCAGTGGACTCAGCAGCACCTGGATGCCGCTGACCTGCGCATGTCTGCCATG
GCCCCCACACCGCCCCAGGGTGAGGTTGACGCCGACTGCATGGACGTCAATGTCCGCGGGCCTGGTAAGGGTGCCAGCAGCCAGGGCTTCCCTAGCC
CCGTGGCCCACCTGCCTCTCTCCCCTAAGCCCCGAGGCTGGGGTACAGTTGATTCTCTGGAAACTTAGAATTGGGGGTGAGAGCTTTCATCCTTGGG
GTGTTTCCCATTCAGAGTAGACGTGGGGGGGTCCTGGAGTCCTCCTGTTCTTCCACCAACCCCTTCCTGGGGTGATACCGCAGGGCCACTCTGTCCC
TGTAAATTACTCTTTTCTGAAACCTTCTTGAGACATGGAAAGCGTTGATTTTCTTTTTCTTTTTTTTTTTTCTTTTTTTTTTGTTTTTGAGATGGAG
TCTCGCTCCGTCACCCAGGCTGGAGTGCAGTGGCACGATCTCGGCTCCCTGCAACCTCCACCTCTCGGGTTCAAGCAATTCTCCTGCCTCAGCCTCC
CCAGTAGCTGGGACTACAGGCGCCTGCCACCACACCTGGCTAATTTTTGTATTTTTAGCAGCGATGGGGTTTCACCATGTTGGCCAGGCTGGTCTCG
AACTCCTGACCTCAGGTGATCCGCCCACCTCGGCCTCCCCCAGTGCTAGGATGACAGCGTGAGCCTCCGCATCCTGCTGAAGCATTAATTTTCTAAC
TGCATGCTTCTGGGGTCCTCTTTTTCCTGGGTGGATTTTGGGTGCCAGGTCTTGGGCAGGTCAGGAAGCAGTTGCCCGCCAGGAGTTTAAGCTGGAT
TCGGCTCTGTCCACTGAGCAGCCCAGGCGGACTTCAGCTGCCCCTTGGTGGCTGTGTGCACGGGGCCACCAAGTGCTGGGTGGTGCATCCACACCGT
GGCCCCTTGAGCTTGGGGCTGCTGCCCCCCTCCCCCTGGGCTGCAGCTGGGGACCGGCCCTCCAGACTGAGCACCCGTCTCTGCCTCTGCAGATGGC
TTCACCCCGCTCATGATCGCCTCCTGCAGCGGGGGCGGCCTGGAGACGGGCAACAGCGAGGAAGAGGAGGACGCGCCGGCCGTCATCTCCGACTTCA
TCTACCAGGGCGCCAGCCTGCACAACCAGACAGACCGCACGGGCGAGACCGCCTTGCACCTGGCCGCCCGCTACTCACGCTCTGATGCCGCCAAGCG
CCTGCTGGAGGCCAGCGCAGATGCCAACATCCAGGACAACATGGGCCGCACCCCGCTGCATGCGGCTGTGTCTGCCGACGCACAAGGTGTCTTCCAG
GTAGGCAGTGGCTGCCTGTGTGCCCACCTGCCCTCCTCAGGGCCGCCTGGTGGTCTGGGGCAGTGGCCAGGCTTACGTGGCCCTGGGAGCCTGACCC
CGAGCACAGCTGAGTCCGGGACAACTGGTGCCTCCACCTGGGACCTTCGCAGTCAGCGAGGTGCGAGGGGGAGGGCGTCGGGCCCATCTGTGTTCTC
CAGGGAAGTCAGGCAGAGGCGGGTCTGGCAGGAGGCCTGGGGGATCTGCTGAGTGAGGCAGCACCTCCCCACCCCCAGCAAAACAGGCTCCATCAGG
GTTGTGGGCCTTGCTCAAGGTCCAGGTTCCACTGCTGCAGCCCCTCGCAGCCCCGCCCCTCCCTCAACCTTGGCTGCCGGCGTAGCCTGTGGCAGTG
AGAAGCAGGGTTTAGAGGCTGCCGCTCGGTGCCTGCAGACCTAGGGCTCAGCTTGCCGGTGAGCTCGTGGCAAGAATGGATTTAGGGATTTGGATGC
CTGGGTCTCCAGGGAGTGTCCCTGGCAGGGGCTGCCTTTGCAGTCACCCCTGCTGCGAGTCCCCAGGCTCCAGGCGGCCCTGGAGCAAGCAGGTTCA
GATGGGCACAGCCCGGGGAGTTACCACIGAGCTTCTCATTTCCTGATTTCTTAGCTCAGGTGACACATTGTCATCTTGCAGAAATAAATGTAGGTGA
GCAGAAAGAGCGTGGAAGGGAGCCCCGTGCGGGTTTGGTGTGTGCCTCTCTCAGCTGCCTTCTTTGCACAGATGTGGAAGTTCCCAGGTGCTTTGCA
GGAATCAGGCCAAGTTGCCTTTTGCACCCGCCAGTGAGCAGGGGCCATTCCTCCTGCCAGATGCCAAGACCCGGCTGCATTACAAGGGCTGCCCACC
CCCTCTCTGGGCAGAGCCGGACACTAGCTCGGCGGTTCTGAGACGGCTGTAGGGCCGTGAGCCCGGCTTCCTGAGTGCCAGCTGTAACCGCCGTTGG
GGGCAGGGACTTGACCTCTCTGTTTTGTAGGTGGTCATGGCAGCTAGGACCACAGTGAGGATTAAATGAGGCCACACGTGGTCACGATGGATCCCAC
TGTCACCAAGGGGCCTGTCTGTGGGCAGCACAGCCCCTGCCCCCATCCGGGCCCCTCCTCAGGGGCAGCCCCATGGCGTTTCGTCTTGCCCGGCCGT
GCCGATCTCAGGAGGGTCTCGTCTGTGTCCGGAAGACAGTGGGGCTTCCCGTCCAGGCGTTCGTTCTGGGCAGGAGGCATCGGTGTACGTCTGCCCA
GCACCCGCCTGAGCCTCTCCCTGTTGCCCAGATCCTGATCCGGAACCGAGCCACAGACCTGGATGCCCGCATGCATGATGGCACGACGCCACTGATC
CTGGCTGCCCGCCTGGCCGTGGAGGGCATGCTGGAGGACCTCATCAACTCACACGCCGACGTCAACGCCGTAGATGACCTGGGTGAGCCCACGGGGG
CACGGCTGCTCTGTCGTGGGGCGGGACCGCCACAGGGACGGGTGGGACTGGGTTGCCTCCAGCTGGTCTCCAACCTACCCCATCTGCTTCTTTCACG
CAGGCAAGTCCGCCCTGCACTGGGCCGCCGCCGTGAACAATGTGGATGCCGCAGTTGTGCTCCTGAAGAACGGGGCTAACAAAGATATGCAGAACAA
CAGGGTGAGCGCGAGGCTGGGATGCCAGGGGAGACGTGAGGGCTGAATCCACAGAGAAGTGAGGGCCAAACCCACGGGGCGCAGGGACACAAGGGCC
TGACCCACAGGGTCTCGAGGGTCGCTGGGCCCGCATGTGGGCCCCACCCGCATGATGCGGGCACCTCGTTAGTGCTCCTGCCCTCCTTCAGCCCCTG
TTTATGGAGCCCTTCCAAGTGCAGGTCCAGCTGTCAGGACACGGCGGCTCGCCCCTCAGACCCAGCCCTACCCTCCTGGGCGGCAGTCATGGCAGGG
CACACAGCCTGGCGTGGGGAACGCTGCTGCTGCCACTGCTGTGTCACCGTCACCTGGACCTCACCTTCTGTCCCCAGCTGTCACCAGGCGGGGGTGG
GGATGGGAATGTGGTGACGCAGGTGGTGCAGATTGAGCCAGAACACGCGTGGCGGCAGCTCCCTGCGGGGCGGGGCCTCTTGGTGTGTTCACCAAGG
CCAAGGACCTCAAGGCTCAGAGGAAGAAGTCTCAGGACTATATCCAAGGGGAGCCACCCCCAGCCCTCATCCTGGCCCTGCAGCTCCTGGCCCTGCA
GCTGCTGTTGGTTTCCCCTGGGTGCTCAGGGCACAGGTGCAGACACCCCCACCTCCCTGCCGCCAGAACCCCCACCCCCGCCCCCAACTCCTGCTGC
CCCCTTGGCATGTCAGGCTCAGGCGTCTCTCCCTCCTGGGTGAGGGCACACAGCGGGCCTGGGCACCGGGGCATGTTGGCCCAGGCGCTCCCCAGTC
CGTGGCAGCATGGCCCCACAGAGACTGGGCCCCAGAGGGCATCAAGGCCTGGGAAGCCCCTTCCCACTCCCACACAGCAGCCTCACCCAGACCTGTG
ACGTGTCCACCGCACAGAGGAGACCCCAGGAAGGAGCTTGGTGGCCACCAGGGTGGCTTGATGGCCGTCCAGATGACGAGCTCCCTCCCTGGTGCCC
TCGCCGGTGCCTCTGAACCGCTCCAGGAATTTCCTTTTGTGCCTTATTGGGGGCAGGGAAGAGGGCCTGCAGTTGGTTAGATTTTCAGTGGGGTCTG
TGACCCCCCCATAGAGGTGGAGCCCCGCTGATCTAGGGTAGAGGACTGCACAGATCCCCTCTCTGGGTGGGTTTCAGAAGATGTATCAAAGCCTTAA
CATTTAACAAGAGTCAGGCTAGGTGGTTGCAGGACGCTGGGGTGGGGTCCTGAGGAGCAGCCTGCCTGCCCCCACCCCGCGGAGGAGGTTGTACTGC
TGCTTCCTCTGGTGATGGAACCTTGGGGAGGGTCCCCACGCCTGGCCTGGCCCCCCTCACCGGCCCCCGCCCTCATCCCCCAGGAGGAGACACCNNN
NNNNNNNNNNNNNNNNNNNNNNNNNNNNNNNNNNNNNNNNNNNNNNNNNNNNNNNNNNNNNNNNNNNNNNNNNNNNNNNNNNNNNNNNNNNNNNNNN
NNNNNNNNNNNNNNNNNNNNNNNNNNNNNNNNNNNNNNNNNNNNNNNTTGCCAACCGGGACATCACGGATCATATGGACCGCCTGCCGCGCGACATC
GCACAGGAGCGCATGCATCACGACATCGTGAGGCTGCTGGACGAGTACAACCTGGTGCGCAGCCCGCAGCTGCACGGAGCCCCGCTGGGGGGCACGC
CCACCCTGTCGCCCCCGCTCTGCTCGCCCAACGGCTACCTGGGCAGCCTCAAGCCCGGCGTGCAGGGCAAGAAGGTCCGCAAGCCCAGCAGCAAAGG
CCTGGCCTGTGGAAGCAAGGAGGCCAAGGACCTCAAGGCACGGAGGAAGAAGTCCCAGGATGGCAAGGGCTGCCTGCTGGACAGCTCCGGCATGCTC
TCGCCCGTGGACTCCCTGGAGTCACCCCATGGCTACCTGTCAGACGTGGCCTCGCCGCCACTGCTGCCCTCCCCGTTCCAGCAGTCTCCGTCCGTGC
CCCTCAACCACCTGCCTGGGATGCCCGACACCCACCTGGGCATCGGGCACCTGAACGTGGCGGCCAAGCCCGAGATGGCGGCGCTGGGTGGGGGCGG
CCGGCTGGCCTTTGAGACTGGCCCACCTCGTCTCTCCCACCTGCCTGTGGCCTCTGGCACCAGCACCGTCCTGGGCTCCAGCAGCGGAGGGGCCCTG
AATTTCACTGTGGGCGGGTCCACCAGTTTGAATGGTCAATGCGAGTGGCTGTCCCGGCTGCAGAGCGGCATGGTGCCGAACCAATACAACCCTCTGC
GGGGGAGTGTGGCACCAGGCCCCCTGAGCACACAGGCCCCCTCCCTGCAGCATGGCATGGTAGGCCCGCTGCACAGTAGCCTTGCTGCCAGCGCCCT
GTCCCAGATGATGAGCTACCAGGGCCTGCCCAGCACCCGGCTGGCCACCCAGCCTCACCTGGTGCAGACCCAGCAGGTGCAGCCACAAAACTTACAG
ATGCAGCAGCAGAACCTGCAGCCAGCAAACATCCAGCAGCAGCAAAGCCTGCAGCCGCCACCACCACCACCACAGCCGCACCTTGGCGTGAGCTCAG
CAGCCAGCGGCCACCTGGGCCGGAGCTTCCTGAGTGGAGAGCCGAGCCAGGCAGACGTGCAGCCACTGGGCCCCAGCAGCCTGGCGGTGCACACTAT
TCTGCCCCAGGAGAGCCCCGCCCTGCCCACGTCGCTGCCATCCTCGCTGGTCCCACCCGTGACCGCAGCCCAGTTCCTGACGCCCCCCTCGCAGCAC
AGCTACTCCTCGCCTGTGGACAACACCCCCAGCCACCAGCTACAGGTGCCTGAGCACCCCTTCCTCACCCCGTCCCCTGAGTCCCCTGACCAGTGGT
CCAGCTCGTCCCCGCATTCCAACGTCTCCGACTGGTCCGAGGGCGTCTCCAGCCCTCCCACCAGCATGCAGTCCCAGATCGCCCGCATTCCGGAGGC
CTTCAAGTAAACGGCGCGCCCCACGAGACCCCGGCTTCCTTTCCCAAGCCTTCGGGCGTCTGTGTGCGCTCTGTGGATGCCAGGGCCGACCAGAGGA
GCCTTTTTAAAACACATGTTTTTATACAAAATAAGAACAAGGATTTTAATTTTTTTTAGTATTTATTTATGTACTTTTATTTTACACAGAAACACTG
CCTTTTTATTTATATGTACTGTTTTATCTGGCCCCAGGTAGAAACTTTTATCTATTCTGAGAAAACAAGCAAGTTCTGAGAGCCAGGGTTTTCCTAC
GTAGGATGAAAAGATTCTTCTGTGTTTATAAAATATAAACAAAGATTCATGATTTATAAATGCCATTTATTTATTGATTCCTTTTTTCAAAATCCAA
AAAGAAATGATGTTGGAGAAGGGAAGTTGAACGAGCATAGTCCAAAAAGCTCCTGGGGCGTCCAGGCCGCGCCCTTTCCCCGACGCCCACCCAACCC
CAAGCCAGCCCGGCCGCTCCACCAGCATCACCTGCCTGTTAGGAGAAGCTGCATCCAGAGGCAAACGGAGGCAAAGCTGGCTCACCTTCCGCACGCG
GATTAATTTGCATCTGAAATAGGAAACAAGTGAAAGCATATGGGTTAGATGTTGCCATGTGTTTTAGATGGTTTCTTGCAAGCATGCTTGTGAAAAT
GTGTTCTCGGAGTGTGTATGCCAAGAGTGCACCCATGGTACCAATCATGAATCTTTGTTTCAGGTTCAGTATTATGTAGTTGTTCGTTGGTTATACA
AGTTCTTGGTCCCTCCAGAACCACCCCGGCCCCCTGCCCGTTCTTGAAATGTAGGCATCATGCATGTCAAACATGAGATGTGTGGACTGTGGCACTT
GCCTGGGTCACACACGGAGGCATCCTACCCTTTTCTGGGGAAAGACACTGCCTGGGCTGACCCCGGTGGCGGCCCCAGCACCTCAGCCTGCACAGTG
TCCCCCAGGTTCCGAAGAAGATGCTCCAGCAACACAGCCTGGGCCCCAGCTCGCGGGACCCGACCCCCCGTGGGCTCCCGTGTTTTGTAGGAGACTT
GCCAGAGCCGGGCACATTGAGCTGTGCAACGCCGTGGGCTGCGTCCTTTGGTCCTGTCCCCGCAGCCCTGGCAGGGGGCATGCGGTCGGGCAGGGGC
TGGAGGGAGGCGGGGGCTGCCCTTGGGCCACCCCTCCTAGTTTGGGAGGAGCAGATTTTTGCAATACCAAGTATAGCCTATGGCAGAAAAAATGTCT
GTAAATATGTTTTTAAAGGTGGATTTTGTTTAAAAAATCTTAATGAATGAGTCTGTTGTGTGTCATGCCAGTGAGGGACGTCAGACTCGGCTCAGCT
CGGGGAGCCTTAGCCGCCCATGCACTGGGGACGCTCCGCTGCCGTGCCGCCTGCACTCCTCAGGGCAGCCTCCCCCGGCTCTACGGGGGCCGCGTGG
TGCCATCCCCAGGGGGCATGACCAGATGCGTCCCAAGATGTTGATTTTTACTGTGTTTTATAAAATAGAGTGTAGTTTACAGAAAAAGACTTTAAAA
GTGATCTACATGAGGAACTGTAGATGATGTATTTTTTTCATCTTTTTTGTTAACTGATTTGCAATAAAAATGATACTGATGGTGATCTGGCTTCCAC
TCCCCTCTGCTCTGGCCCTTTGGCTCCCTTTCTGGGAGGGAGCAGGGCTGCTATGCTCTGAGGGAGCCAGGAGTCGAGGGCCCCTTCTGCTGGGAGA
GTGACGGTGAGGCTGCCTAGTCCTGGCCCACGGGGGTGTGGGGACCACGCTGCCTCCAGGGACTCCATGGTGTCTGCAGCCTGCCTGGTCCAGGCCC
TTTGTAGGGAGATGGACACACAGCAGCAAGGGGGTTGCAGCCCTATGGGAGGTGGGGCTCGTGCCTGGGGTGACACGGCTCCCAGGACACCATGCGT
GAGTCTGGCCCTCCTGGCAGCTCGGGGCTCTTCTCCTCTCAGCCTCGGAGGGATGAAGGTCCCACCCAGCCATCCTGGGGACAGCCCCTCAGGGAGC
TCTGCAGCAGGCAGGGGGCTGCATAGGGAGGGCCTTGAGGCAGTGGCATGACCCCTCTACGGGCTGGAGACCACAGGGAGGACTCTGGCCCCTATAG
GAGGGCAAAGGGAGCTGTCGAAGCCTATGAGCAGGGCAGCATGGGTCGTGGCAGAGTCTGGAAAGTTGTGTGATCCTAAGGAACTGGCTGAGCGAGG
CAGAGGCGGCCTGGTCCTGGGGCCCTGCCCCTGAATAGAGCTGCCAGCCTCACACAAGGGTGGGCCCCTTCTCTCCCCACTGCCTGGGCCTCTGCCC
AGCCCCAGACCTTCAGGGCAGGCCAGTGGCTTCAAACCAGAGCGGTGGGGAGTCTGAGATCCCTCTTTGGATTGCAAAGCACTGCCTGCCCTGGGCC
CAGTCTCTCCAAGGAGGGATGTGAGCCCGAGGCCTCTACTATGGCTGGGGGCTGCGNNNNNNNNNNNNNNNNNNNNNNNNNNNNNNNNNNNNNNNNN
NNNNNNNNNNNNNNNNNNNNNNNNNNNNNNNNNNNNNNNNNNNNNNNNNNNNNNNNNNNNNNNNNNNNNNNNNNNNNNNNNNNNNNNNNNNNNNNNN
NNNNNNNNNNNNNNNNNNNNNNNNNNNNNNNNNNNNNNNNNNNNNNNNNNNNNNNNNNNNNNNNNNNNNNNNNNNNNNNNNNNNNNNNNNNNNNNNN
NNNNNNNNNNNNNNNNNNCCGGCATCACTCAGTACAGCCACAGACAGCCTGAGCGTCCACTGCCAACGACGGGTCAGCAAAAACCGTCTGCTGTGAC
GGTGAACCTTAGTGTCAGCTTGGCCGGGCCATTTCGCCAAACGGAGTGTGTCTCTGAGGTGTTCTGGATGAGGTTCGCATTTGCATCCACAGCCTGG
GTAAGGCAGTCCGCCCTCCCCAGTGTGGGTGGGCCCCGTGCGGTCCGCTGAGGCCCGGGGAGAACAATAGGCCGAGTGCCAGGGGTCCTCCCACCCA
ACCGCTTGCACTGGACATTGGTCTTTTCCTGCCTTCAGACTTGGACTGAAAACGTGGGCTCTTCCTGGGCCTGGAGCCCACCGGCCTTCGGACTCGC
AACGCCATCAGGCCTCCTGCCTGCAACTGCAGACCCTGGGAACTGCAGGCCTCGAGGTCGTGTGGCCAATTCCCTGCAATAACCTCTCCAGTGGCAC
GTCTTATGGGCTCCGCTTGCCGGAAGAACCCTGACGAATGCGCACGAGGGAATATGATTCCACCGTAGAAAAGGAGGCGCTGACACCCACCATGCGG
ACAAGCCTTGGAAGCACGGTGCTCAGTGAAGGGTGCCGGCCGCAAAGGGCCGCAGGTGCAGTGACTCCATTTCTATGGGGTGCCTGTGGTCACCGAA
CCCATGGAGACAGAAAGTAGATTGATGGTTCCCAGAGCCGGGGGGAGGAGGAAAGGGGAGTGGCTGCTAAACGGCCCGGGGTTTTTTTTTGTTTTGT
TTTGTTTTTATACTTTAAGTTTTAGTTTATTGTGGCACTGTTCACAATAGCAAAGACTTGGAACCAACCCAAATGTCCAACAATGATAGACTAGATT
AAGAAAATGTGGCACATATATACCATGGAATACTATGCAGCCATAAAAAATGATGAGTTCATGTCCTTTGTAGGGACGTGGATGAAGACGGCCCGGG
GTTTTACTTTGGAGTGACGCAAATGTTCTGGGCCCAGGGAGAGGTGGTGCGTGCACAGCCCTTCGAGTGCACTAAATGCCAATAACGCGGACACTTT
TTTTTTTTTTTTTTTGAGACGGAGTCTCGCTCTGTCACCCAGGCTGGAATGTGGTGGCGTGATCTTGGCTCACTGCAACCTCCGCCTCTGTGTTCAA
GTGATTCTCCTGCCTCAGCCTCCAAAGTAACTGGGATTACAGGCCCCTACCACCACACCCGGCTGATTTTTTTGTATTTTTAGTAGAGATTGGGTTT
CACCATGTTGGCCAGGCTGGTTTCAAACTCCTGATCTCAAGTGATCCACCCGCCTCGGCCTCTTAAAGTGCTGAGGTTACAGGCGTGAGCCACTGCA
CCTGGCCTAACTCGTACACTTTAAAGTGGTTAATTTTAGGTTCTGTGAGTCTCACCTCAATATGTTATTTTTTTTTTTTAATTAAAAAAAGTTTTTG
AGACAGGGTCTTGCTCTGTCACCCAGGCTGGAGTGCAGTGGTGCCATGATAGCTTATTGCAGCCTCAACCTCCTGGGCCCAGGTGATCCTCCCACCT
TGGTCTCTCTAGCAGCTGGGATTACAGGTGCACACCACCTCACCCACCCAATTTTTTTGTTATTTTTTGCAGAGATGGGGTCTCACTTTGTTGCCCA
GGTTGGTCTCGAACTCCTGAGCTCATGCAGTCCTCTCCTCACCTTGGCCTCCCAGAGTGCTGGGATTACAGGTGTGGGCCATTGCGCCTGGCCACAT
ATGCAACTTTAAATATTTCAGTAGCCACATTAAAAAGGTAAAAAGAAACAGGCAAAGTGTATATTAATACTACAGCTTAGTTAATCCAATATATCAA
AAATATTATTTTAACACAACATAAAAAGTGAATGAGTTTTTTTTTGTTGTTTTTTGTTTTTTGAGACAGAGTCTCCCTCTGTCACCCAGGCTGGAGT
GCAGTGGTGCGATCTCAGCTCACTGCAACTTCCGCCTCCCGGGTTCAAGCGATTCTCCTGCCTCAGCCTCCCGAGTAGCTGGGATTACAGGCACCTG
CCACCACGCCCAGCTAATTTTTGTATTTTTAGTAGAGAGGGGGTTTCACCATGTTGGCCAGGCTGGTCTTGATCTCTTGACCTCGTGATCGGCCCAC
CTCGGCCTCCCAAGTGCGGGATTATAGGCGTAAGCCACCACGCCCGGCCGTGAATGAGATGTTTTATATTCTTTTTGTTTGTTGTTGTTTTTGGTAC
TGTGTCTTTGAAACCCAGGATGTACAGTACACTCACAGCACCCTAGATTGGGCCTGGCCACACTTTAAAAGGTGTTCAGTATCTCCAGGAGGCTCAC
GTCCAGATTCGGACTCTTCAGCAGGATGCCAAGGGGGCTCCAGACAGTTCCACCCAGCGCAGGAAAACACCAAGTGTATCTTCAGCCTGGTGACTCA
CTCCACGCCGCTGCCGGCGTGAACCCCGAGTGTGGCGCTGCGTCCCTCTGGATAGAGCAAAGGAGGGTCCCAAGAGCCCGGAGGCACCAACTCATCA
GGGCCCACAAATCAGGCCCCCGGCAGGCAGGGCTGCCTCCATCCAAGAGGGAAGCACGGTGCCGTAGCCCCCGGGCTGCTCCAGGGATCGACAGGCC
TGTGCTGCCTTCATCCCAAAAGTCTCACTTGCAAAGGGTGTCCGTGGGGCTCAACTGCGTGCTCAGCGGTGGACTGATTTCGTTCTGTGTGGCTCCT
TATCTCATCGTGGACCCAAATCCACGAACCACACATGAGGAGCTCTGCTGGAGGGGGCAGCACTGGGCAGAGGCAGACAAGGGGGAGCGTCACGCGG
CTGTTTCCCGTGGTGAGCATCCACCAGCAGCGGTTCCTGGTGGGACACCGACGTATTCGTCTGCAAAAGTAAAAGTGTTTCAAAACAAAACCGGGTC
CAGCTTGGTCCCGGTGCGTTGAAAGTGCTGGCGTTGGCCAGGCGTGGTGGCTCACGCCTGTAATCCCAGCACTTTGGGAGGCTGAGGCGGGTGGATC
ACAAGGTCAGGAGATTGAGACCATCCTGGCTAACACGGTGAAACCCCGTCTCTACTAAAAAATACAAAAAATTAGCCGGGCGTGGTGGCAGGCGCCT
GTAGTCCTAGCTACTTGGGAGGCTGAGGCAGGAGAATGGCGTGAACCTGGGAGGCGGAGCTTGCAGTGAGCAGAGATCATGCCTCTGCACTCCAGCC
TGGGCGACAGAGCAAGACACTCTCACAAAAAAAAAAAAAAAAAAAAAGTGCTGGCGTTAGTGGAGGTCTCTCAGAGGGGGCGTTGCAGGGCCTCCCA
CGTTACTCAGGCTTTGCAGACGAAGACGCAGGGTCCGTGAGTGAGCGAGCTTTGGGAAAGGCTGTTCTTCAATCTGCATCTTGAAGGTGGCTGGGTG
GCGCCTCAGTCGCCTGCCCCGACGTGACTCCCGATCTGGCTGCTTCGTGTCTTTGCTTTCCACCTGGCGGCTGCTGTCCTGGCTGTTGCTGTACCTC
AGTGTCCTCGTGGGTCAAGTGGGGACCTGGGTGCTGGCCCTGGGCCTGCGATGGTGAGCTGCTGGTGCACGCTGGGCATGGGGTGAGGGCTCAGAAA
GGGAACAGCTCTTGTTATCGTTAGGAGGTTTTCAATCGCATTCTTTGTTCTCCACCTGCATGCCGTGTTGGCACAGTTAAGCCTGGCGGCCCCTTCA
GCAGGTGTCCTAACCGTCTACATTTTAAGATGGACAAGTCTAGGCTCATGGAGATTGCAGGACTGAGCTGCGAAGCTTTATTCATGCCCAACACGAC
AGGCGCCAGGTGCCCAGGGCCTCAGAGGTGGGTTTCCGTTGTTCTTCACACAACCTTGAACTTGTGGCCCATCCCTGGACCTTACAGCACAGGACAC
ACTCTCAGTGTTTGTTAGGAATCTATAATTTTCTGCGGAGTCACGCGTGATATTTGCTGTGGCTTTTGGTATATCTTCCACTCTATCGCACGGGATT
TTCTGGTGAAAATGTGCCCTGGGTCCACACAAACGTGCACATTCTACCACAGCCTTTGTCGTTCTGTTTGGCATTTTTCCATTTAATAAAATGAACC
TTAGAAAAGTTATAACTACGGCCAGGCGTGGTGGCTCACACCTGTCATCCCAGCACTTCGGGAGGCCGAGGCGAGAGGATCACCTGTGGTCAGGAGT
TCCACACCAGCCTGGTCAACTGGTGAAACCCCCCTCTCCACTAAAAATACAAAAATTAGCTGGGCACCATGGTGGGCACCTAGAATCTCAGCTACTT
GGGGGGGCTGAGGCAGGAGAATTGCTTGAATTCGGAAGGAGGAGGTTGCAGTGAGCTGAGATTGCACCACTGCACTCCAGCCTGGGGGATACAGTGA
GACTCGGTCTCAAAAAAAAAAAAGAAAAGTGTATAACTTTACTTTTTTTTCTTTTTGTGGAGATGGAATCTTGCTATGTTGCCCAGGCTGGTCTCAA
ACCCCTAGGTTCAAGTGATCCTCCCACTTTGGCCTCCCAAAATGCTGAGACGACAGATGGGAGCAACCTCACCTGGCAAGCGTGCACCTGTTACTTT
GGCCGACTCAGAGGCGGCTCTCTGCCTCCCCCTGGTGGCACTGCTCTGCCAGCGCCCCACAGGTCCTCCCGAGTGACCACAGGGCAGAAATGGCCCT
CACCCCACGCCCAGGGCCATCCCCCGCGACACTGCTATTATCCTGTTTTACACATGAGGAAGCTGGGGCTCAAAGAGGTTAGGCGACTTAGCCAAGT
TCGCCCATTCACTGAGCCAGGGCTATGTGATTCCCGGTCCGTGTCAAACCACGAGGAGTCACCTGCCCTCAGAGGAGCAGGAAGGCCTGTAGAGTTG
ATGCCATCCAGCCTGGTGACTTTTCAGACAGGGAGACGGCTGCTCAGAGGGGAGAAGGGGGTTGTTGGGCCACTTTGCCAGGAGTCAATACCATGGC
CAGCCTGGCATCGGATACTTTGCCAGGAGTTAATGCCACGACTGGCCTGGCATCGAATACTGGAGCTCTTCCCAGCTCCACCCGGGCCCTTTTCTCT
TCCCTATCTACAGTCCCCAGGCCACCAAGTCCATGTCCACCACTTAAATCATCACTCAATGCTCAGGACTGTCTCCTGCCTGCTGTGTGTGAACCCC
GTGCTGTGCTGGGGTTGTGCCCTCGGGGACTCTCCCGGGTTCTTGGGGACTCTCCTGGGTTCAGCGCCTCTTTCTCCTAGGCCACCCAAGGCTGCCT
CCTGGGCCCTGGCTCTCCCTAGCCCCTAGCTCGAACCCTAACCTGGAGAGCCTTTGGGGCCCAAACTGGTTGCATCGCTCCTGGCTGAAAAGCCTCT
GGAAGCTTCCTATACTTCCAGACACCACCTGCGGGTCTCTTAGCAAGCCTACAGAGTCCACACTAGCCTACGCCCACTGGCCGCTCACCCCGCAGAA
GCCTCATGTGGACTGTTCACTTCAGCCAGAAATGCTCCTTCTCCTCCTGCCTGTCCCCAGCAGACACTGCATGGTGCCCTCTGTATGGGCACCTCTG
TGGCCAGCCAGCATCCATGTTCCCCGGAGGCAGAGTCTGGGCTTGTCTGTCTCACGGCCACAGCCCAGCTCCTAGCAGTGCCTGGGGTACAGCAGGG
ACTCAGCAGACATCTGTGCATGGTTTGGGGATAGAGGACTCGTGGGCTTACCAAGACCCTGCCTCAGCTCAAGGACAGCCAGCAGTTCCTCCTGTGG
CCCTGGGGGCCTGCGGTCCCAGGTTACTGTGACATCGACATCAGCCTTGAGCTTTCTGCTTCATTCCTAGTGCTTTTTAGCACCTTACATGGTAAGT
ACTTGGCTCAATGATTCCAGAAAAATGTTCTCTGAGACCTGCTATGTGCCCAACATGCTTGAAGATGCTGGAGATGAGGAGCATGACGCTCCTGCAG
TAACGAGGCTGCTGGCAATGCCGTCAATGTGCCCTGTGCCTCCGGGGAGGCCTGGTGTGGAGGATACGCTTGCCACCCTGTGAGGTCAGGTCCAGGA
AGTCCTTGCAGGAGGCCGGGAAAGGGCAAGGCTGTCACCTTCTTTTACAGGGGAGGAGGCAGAGGCTTGGAAAGGCCAGGTAGCTTGCCCAAGGCTG
AACACCTGGGTAGTGGCTGAGGGTCTCTGACTTCTGGAAGCTTGCAGTACAGCTGGACACACGGTAGTTAGCCCACCATTGCTGGAGCCATCTTACC
TGTGCTCTGCTAGCCAGGTGGGCGCCCAAAAGGAGATGCCTTTGCCTGTGCTGGGAGGAGGCGCTGTGGGACCCATTCCCCAGCAGCCGAGAGCAAG
GGCACATGTGCCAGGGCGGGGATGCACCTTCAGCCTCATGTCAGCCCTGGGAAGGCCTAGAAAGTGGACAGTGCTGTCTCGCTGCACACCCCTGGCG
AGCACACCGGGCGAGCACTCCAGGTTAGGGTGGGGCTCAGAGGTGAGTAGAACACGGGAAGGGGGTGGCAGCGTGGTGAGCATGTTTGCGGACCCTA
TGCTGTGTGCTTGGCAGGCCTTGTGCATGGAAGTGAGTGGGACTGAAGCTCCCTCCACACTGCCCACCATGGCCCTGGGGGTCTGGCCTTCCCCTCA
CAGAGGTGACTTCCTCTCCTCTATGAGGGTAAGAAGAGGAAGCCTGGCCCACCCTCTGGCCAGCCTGGTGGCATGCTGACAGGGAACCCCTGCAGGG
GCCTGATGAACAAACGCCACAGAACAAACTCTACGGACCCTGCCTCCAGATCTGCTTCCTCTCCCCTGATTCCAGCTTCCCAGCCCTATTCCCTCCT
CCTCCAGGAAGAGCTCCGTGTCAGTGCTCTCCACCTTGGAGGCCTTCATATGTTTTTTTGCCTGGACCACCCAGCTAACCGTCTCACAGAGACTGCC
CCTTCCTCTCTCCAGGCCAAGCCTCCAGCTTCAGCGTCCAGGACTAAGGGTCTGTGTCAGGGGCTGAGGACAGTGTCCGGCAGGGAGCAGGCCTGCC
CAGTAAACCTCCACAAGCACCCAGACATACTCGCCACTGCTATTTTACACCAGGTAGGAAAGAGGAGCAGAAGCTCACAGTGAGGGGCCGTCCTGCG
TTCACTGAGACTGCTGCTCTGCTGGGGGCTCCCTGGAGGACCGCCACTGGCCCGCCAGTTGTCAGCAAAGAGCCAGGTCCACCCATCAGCCTCTGGC
ATTTCAGGCCCCTATCATAGGAGGCTATAAGCACAGGCTAGGGGTGCTGAGTGCCTGCCTTCTAGACCAACACTGTCCAGTGGAAATGTAACACCAG
CCCCATGTGGAGTTTTACATTTCCCAGCAGCTATGTCAAAAACAAAAGAAACAGGTGAAATAAAATTAAATAGTATTTTGTTTAATCTGATACATCC
AAGATATTGTCATTTTAATATGCAATAAAAAATCATTGATTCGATATTTGCATCCTTCACAACCTACCATGTAGTTTACACTCAGAGCCCAGCTCAG
TCTCACAGCAAGCACCAGCGGCCCCCGTGCTGGACAGCATGGCTAATGGGAGGAGCTGACCCGTCGGAGGCACCAAGGTCACGCTGTGACCAAGGCT
GTGGTGACGCAAAGGCAGCGGGTTTCCTGGCACAGCCTGGAGGTGCACCAGCCTGTCCTGTGTGCTCTGCATAATGTGGTACAGCAGTGGTCACAGA
GCTTTGCACCAGATGCTGATTCCAGCCCACCTAGGGGGGTTCAGGGAAGTGGTGACACTTGTGTCCAGCCTCCAGGTGTGAGCAGGGGCAGAGACTT
GGAGAATGGAGAAACCAGCGGATGCTGCAGGCAAAAGCAGCAAAGCCCCACCAGGAATAGTGATGGCCACCACCGGCGGGACACCTCCCAGCACTGG
GTGGAGGCCTCTGCTGGCTCGCAGTCAGTCACCTGATGTCCCCATTCGCCCCTGCCATGCTTGTTGTCCTGGCAACCCCATTTCAGCCCTGAAACGT
TTAGGTGCTCATCTTGCTCTATCTTAGAGATGAAGACCTGATGCTCAGAGACTAAGGAAGTTGAAAAAGGGCACACAGCGTCTCAGGGGCAGGCTGG
GCCTTCAACGGAAGGGTCTATGGCCCAGAGGCTGGATGGGCTCGGGTGTAGGGTGCAGGAACCCTCCACTCCACATCAGGCTACAAACTGCTGAGAG
CTGTCTCCGTGCACTCAGGATTAGGGAGAAGAGGGGGAAGAAAGACAGCCGCGCCCCCTGCAGGTGATGTGGTGATTCACACCCCTAGGAGCCAACA
GAAGCCGCTGTCTAACATCCCTGCCCTGAGGTCCAGAGACCTTGCATTTTATGCCTAGGGCAGGGTTGGTTTCTGCAGCTATGGTCTCTCCCATAGC
TTAGTGCCCACCCCGGTGGGACCACAGGGTTTCGGAGGACCCTAGAGGGTCGAGCCCTGGGCTCCTGGCTCTTGGGTTCTTTGAACTCGCGAGCGGC
AAAAGGCGAGCCCCACGCCTGAGAGGCAGCATCCACCTCTGCATCCCCCTCTTTGGAAAGGGCAAACAATGACACCTCCTTCCGCGGAGGGTGCAGA
GCGCCTCGACCACTGGGAAGAAGCAGATGGGGGCAGCGGGGCTGGGGCTGGGCCCTACCACGTGCTCCCTAACTCTGTTCAAACAGGTCAGGAATCT
GACTCCTGAAAGGCAAATGTTAGCTGAGCAGATTGGCCCTGGTGCCACGTCAGCCGGACTGAAGCTCTCCCTGCACCGCCTGCGGCCCTGCTGGCGT
GGCACGGATATCACCCCCTCCCTCACCAGCCGCCGGCCCAGCTGGGGACAAGGGTGGCTCCCACCCAGGGAGGACCTCAGCCGCTGCTGGGAGCTCA
GCCTCCCGCGATGCCATCGGGCGGGCACCCCCACCACGGCGCCTGCCCTCTGGAAGGAGCAGCAGAGGAAGGCCGCGGCTCTTCCCTGCCCTTGC
HUMAN SEQUENCE - mRNA
AGGCCCGCGATGCTCCCAGCCCGGTGAGACCTGCCTGAATGGCGGGAAGTGTGAAGCGGCCAATGGCACGGAGGCCTGCGTCTGTGGCGGGGCCTTC
GTGGGCCCGCGATGCCAGGACCCCAACCCGTGCCTCAGCACCCCCTGCAAGAACGCCGGGACATGCCACGTGGTGGACCGCAGAGGCGTGGCAGACT
ATGCCTGCAGCTGTGCCCTGGGCTTCTCTGGGCCCCTCTGCCTGACACCCCTGGACAATGCCTGCCTCACCAACCCCTGCCGCAACGGGGGCACCTG
CGACCTGCTCACGCTGACGGAGTACAAGTGCCGCTGCCCGCCCGGCTGGTCAGGGAAATCGTGCCAGCAGGCTGACCCGTGCGCCTCCAACCCCTGC
GCCAACGGTGGCCAGTGCCTGCCCTTCGAGGCCTCCTACATCTGCCACTGCCCACCCAGCTTCCATGGCCCCACCTGCCGGCAGGATGTCAACGAGT
GTGGCCAGAAGCCCGGGCTTTGCCGCCACGGAGGCACCTGCCACAACGAGGTCGGCTCCTACCGCTGCGTCTGCCGCGCCACCCACACTGGCCCCAA
CTGCGAGCGGCCCTACGTGCCCTGCAGCCCCTCGCCCTGCCAGAACGGGGGCACCTGCCGCCCCACGGGCGACGTCACCCACGAGTGTGCCTGCCTG
CCAGGCTTCACCGGCCAGAACTGTGAGGAAAATATCGACGATTGTCCAGGAAACAACTGCAAGAACGGGGGTGCCTGTGTGGACGGCGTGAACACCT
ACAACTGCCGCTGCCCGCCAGAGTGGACAGGTCAGTACTGTACCGAGGATGTGGACGAGTGCCAGCTGATGCCAAATGCCTGCCAGAACGGCGGGAC
CTGCCACAACACCCACGGTGGCTACAACTGCGTGTGTGTCAACGGCTGGACTGGTGAGGACTGCAGCGAGAACATTGATGACTGTGCCAGCGCCGCC
TGCTTCCACGGCGCCACCTGCCATGACCGTGTGGCCTCCTTCTACTGCGAGTGTCCCCATGGCCGCACAGGTCTGCTGTGCCACCTCAACGACGCAT
GCATCAGCAACCCCTGTAACGAGGGCTCCAACTGCGACACCAACCCTGTCAATGGCAAGGCCATCTGCACCTGCCCCTCGGGGTACACGGGCCCGGC
CTGCAGCCAGGACGTGGATGAGTGCTCGCTGGGTGCCAACCCCTGCGAGCATGCGGGCAAGTGCATCAACACGCTGGGCTCCTTCGAGTGCCAGTGT
CTGCAGGGCTACACGGGCCCCCGATGCGAGATCGACGTCAACGAGTGCGTCTCGAACCCGTGCCAGAACGACGCCACCTGCCTGGACCAGATTGGGG
AGTTCCAGTGCATCTGCATGCCCGGCTACGAGGGTGTGCACTGCGAGGTCAACACAGACGAGTGTGCCAGCAGCCCCTGCCTGCACAATGGCCGCTG
CCTGGACAAGATCAATGAGTTCCAGTGCGAGTGCCCCACGGGCTTCACTGGGCATCTGTGCCAGTACGATGTGGACGAGTGTGCCAGCACCCCCTGC
AAGAATGGTGCCAAGTGCCTGGACGGACCCAACACTTACACCTGTGTGTGCACGGAAGGGTACACGGGGACGCACTGCGAGGTGGACATCGATGAGT
GCGACCCCGACCCCTGCCACTACGGCTCCTGCAAGGACGGCGTCGCCACCTTCACCTGCCTCTGCCGCCCAGGCTACACGGGCCACCACTGCGAGAC
CAACATCAACGAGTGCTCCAGCCAGCCCTGCCGCCACGGGGGCACCTGCCAGGACCGCGACAACGCCTACCTCTGCTTCTGCCTGAAGGGGACCACA
GGACCCAACTGCGAGATCAACCTGGATGACTGTGCCAGCAGCCCCTGCGACTCGGGCACCTGTCTGGACAAGATCGATGGCTACGAGTGTGCCTGTG
AGCCGGGCTACACAGGGGAGCATGTGTAACATCAACATCGATGAGTGTGCGGGCAACCCCTGCCACAACGGGGGCACCTGCGAGGACGGCATCAATG
GCTTCACCTGCCGCTGCCCCGAGGGCTACCACGACCCCACCTGCCTGTCTGAGGTCAATGAGTGCAACAGCAACCCCTGCGTCCACGGGGCCTGCCG
GGACAGCCTCAACGGGTACAAGTGCGACTGTGACCCTGGGTGGAGTGGGACCAACTGTGACATCAACAACAATGAGTGTGAATCCAACCCTTGTGTC
AACGGCGGCACCTGCAAAGACATGACCAGTGGCTACGTGTGCACCTGCCGGGAGGGCTTCAGCGGTCCCAACTGCCAGACCAACATCAACGAGTGTG
CGTCCAACCCATGTCTGAACCAGGGCACGTGTATTGACGACGTTGCCGGGTACAAGTGCAACTGCCTGCTGCCCTACACAGGTGCCACGTGTGAGGT
GGTGCTGGCCCCGTGTGCCCCCAGCCCCTGCAGAAACGGCGGGGAGTGCAGGCAATCCGAGGACTATGAGAGCTTCTCCTGTGTCTGCCCCACGGGC
TGNNNNNNNNNGGCAGACCTGTGAGGTCGACATCAACGAGTGCGTTCTGAGCCCGTGCCGGCACGGCGCATCCTGCCAGAACACCCACGGCGGCTAC
CGCTGCCACTGCCAGGCCGGCTACAGTGGGCGCAACTGCGAGACCGACATCGACGACTGCCGGCCCAGACCCGTGTCACAACGGGGGCTCCTGCACA
GACGGCATCAACACGGCCTTCTGCGACTGCCTGCCCGGCTTCCGGGGCACTTTCTGTGAGGAGGACATCAACGAGTGTGCCAGTGACCCCTGCCGCA
ACGGGGCCAACTGCACGGACTGCGTGGACAGCTACACGTGCACCTGCCCCGCAGGCTTCAGCGGGATCCACTGTGAGAACAACACGCCTGACTGCAC
AGAGAGCTCCTGCTTCAACGGTGGCACCTGCGTGGACGGCATCAACTCGTTCACCTGCCTGTGTCCACCCGGCTTCACGGGCAGCTACTGCCAGCAC
GATGTCAATGAGTGCGACTCACAGCCCTGCCTGCATGGCGGCACCTGTCAGGACGGCTGCGGCTCCTACAGGTGCACCTGCCCCCAGGGCTACACTG
GCCCCAACTGCCAGAACCTTGTGCACTGGTGTGACTCCTCGCCCTGCAAGAACGGCGGCAAATGCTGGCAGACCCACACCCAGTACCGCTGCGAGTG
CCCCAGCGGCTGGACCGGCCTTTACTGCGACGTGCCCAGCGTGTCCTGTGAGGTGGCTGCGCAGCGACAAGGTGTTGACGTTGCCCGCCTGTGCCAG
CATGGAGGGCTCTGTGTGGACGCGGGCAACACGCACCACTGCCGCTGCCAGGCGGGCTACACAGGCAGCTACTGTGAGGACCTGGTGGACGAGTGCT
CACCCAGCCCCTGCCAGAACGGGGCCACCTGCACGGACTACCTGGGCGGCTACTCCTGCAAGGTGCGTGGCCGGCTACCACGGGGTGAACTGCTCTG
AGGAGATCGACGAGTGCCTCTCCCACCCCTGCCAGAACGGGGGCACCTGCCTCGACCTCCCCAACACCTACAAGTGCTCCTGCCCACGGGGCACTCA
GGGTGTGCACTGTGAGATCAACGTGGACGACTGCAATCCCCCCGTTGACCCCGTGTCCCGGAGCCCCAAGTGCTTTAACAACGGCACCTGCGTGGAC
CAGGTGGGCGGCTACAGCTGCACCTGCCCGCCGGGCTTCGTGGGTGAGCGCTGTGAGGGGGATGTCAACGAGTGCCTGTCCAATCCCTGCGACGCCC
GTGGCACCCAGAACTGCGTGCAGCGCGTCAATGACTTCCACTGCGAGTGCCGTGCTGGTCACACCGGGCGCCGCTGCGAGTCCGTCATCAATGGCTG
CAAAGGCAAGCCCTGCAAGAATGGGGGCACCTGCGCCGTGGCCTCCAACACCGCCCGCGGGTTCATCTGCAAGTGCCCTGCGGGCTTCGAGGGCGCC
ACGTGTGAGAATGACGCTCGTACCTGCGGCAGCCTGCGCTGCCTCAACGGCGGCACATGCATCTCCGGCCCGCGCAGCCCCACCTGCCTGTGCCTGG
GCCCCTTCACGGGCCCCGAATGCCAGTTCCCGGCCAGCAGCCCCTGCCTGGGCGGCAACCCCTGCTACAACCAGGGGACCTGTGAGCCCACATCCGA
GAGCCCCTTCTACCGTTGCCTGTGCCCCGCCAAATTCAACGGGCTCTTGTGCCACATCCTGGACTACAGCTTCGGGGGTGGGGCCGGGCGCGACATC
CCCCCGCCGCTGATCGAGGAGGCGTGCGAGCTGCCCGAGTGCCAGGAGGACGCGGGCAACAAGGTCTGCAGCCTGCAGTGCAACAACCACGCGTGCG
GCTGGGACGGCGGTGACTGCTCCCTCAACTTCAATGACCCCTGGAAGAACTGCACGCAGTCTCTGCAGTGCTGGAAGTACTTCAGTGACGGCCACTG
TGACAGCCAGTGCAACTCAGCCGGCTGCCTCTTCGACGGCTTTGACTGCCAGCGTGCGGAAGGCCAGTGCAACCCCCTGTACGACCAGTACTGCAAG
GACCACTTCAGCGACGGGCACTGCGACCAGGGCTGCAACAGCGCGGAGTGCGAGTGGGACGGGCTGGACTGTGCGGAGCATGTACCCGAGAGGCTGG
CGGCCGGCACGCTGGTGGTGGTGGTGCTGATGCCGCCGGAGCAGCTGCGCAACAGCTCCTTCCACTTCCTGCGGGAGCTCAGCCGCGTGCTGCACAC
CAACGTGGTCTTCAAGCGTGACGCACACGGCCAGCAGATGATCTTCCCCTACTACGGCCGCGAGGAGGAGCTGCGCAAGCACCCCATCAAGCGTGCC
GCCGAGGGCTGGGCCGCACCTGACGCCCTGCTGGGCCAGGTGAAGGCCTCGCTGCTCCCTGGTGGCAGCGAGGGTGGGCGGCGGCGGAGGGAGCTGG
ACCCCATGGACGTCCGCGGCTCCATCGTCTACCTGGAGATTGACAACCGGCAGTGTGTGCAGGCCTCCTCGCAGTGCTTCCAGAGTGCCACCGACGT
GGCCGCATTCCTGGGAGCGCTCGCCTCGCTGGGCAGCCTCAACATCCCCTACAAGATCGAGGCCGTGCAGATGAGACCGTGGAGCCGCCCCCGCCGG
CGCAGCTGCACTTCATGTACGTGGCGGCGGCCGCCTTTGTGCTTCTGTTCTTCGTGGGCTGCGGGGTGCTGCTGTCCCGCAAGCGCCGGCGGCAGCA
TGGCCAGCTCTGGTTCCCTGAGGGCTTCAAAGTGTCTGAGGCCAGCAAGAAGAAGCGGCGGGAGCCCCTCGGCGAGGACTCCGTGGGCCTCAAGCCC
CTGAAGAACGCTTCAGACGGTGCCCTCATGGACGACAACCAGAATGAGTGGGGGGACGAGGACCTGGAGACCAAGAAGTTCCGGTTCGAGGAGCCCG
TGGTTCTGCCTGACCTGGACGACCAGACAGACCACCGGCAGTGGACTCAGCAGCACCTGGATGCCGCTGACCTGCGCATGTCTGCCATGGCCCCCAC
ACCGCCCCACGGTGAGGTTGACGCCGACTGCATGGACGTCAATGTCCGCGGGCCTGATGGCTTCACCCCGCTCATGATCGCCTCCTGCAGCGGGGGC
GGCCTGGAGACGGGCAACAGCGAGGAAGAGGAGGACGCGCCGGCCGTCATCTCCGACTTCATCTACCAGGGCGCCAGCCTGCACAACCAGACAGACC
GCACGGGCGAGACCGCCTTGCACCTGGCCGCCCGCTACTCACGCTCTGATGCCGCCAAGCGCCTGCTGGAGGCCAGCGCAGATGCCAACATCCAGGA
CAACATGGGCCGCACCCCGCTGCATGCGGCTGTGTCTGCCGACGCACAAGGTGTCTTCCAGATCCTGATCCGGAACCGAGCCACAGACCTGGATGCC
CGCATGCATGATGGCACGACGCCACTGATCCTGGCTGCCCGCCTGGCCGTGGAGGGCATGCTGGAGGACCTCATCAACTCACACGCCGACGTCAACG
CCGTAGATGACCTGGGCAAGTCCGCCCTGCACTGGGCCGCCGCCGTGAACAATGTGGATGCCGCAGTTGTGCTCCTGAAGAACGGGGCTAACAAAGA
TATGCAGAACAACAGGGAGGAGACACCCCTGTTTCTGGCCGCCCGGGAGGGCAGCTACGAGACCGCCAAGGTGCTGCTGGACCACTTTGCCAACCGG
GACATCACGGATCATATGGACCGCCTGCCGCGCGACATCGCACAGGAGCGCATGCATCACGACATCGTGAGGCTGCTGGACGAGTACAACCTGGTGC
GCAGCCCGCAGCTGCACGGAGCCCCGCTGGGGGGCACGCCCACCCTGTCGCCCCCGCTCTGCTCGCCCAACGGCTACCTGGGCAGCCTCAAGCCCGG
CGTGCAGGGCAAGAAGGTCCGCAAGCCCAGCAGCAAAGGCCTGGCCTGTGGAAGCAAGGAGGCCAAGGACCTCAAGGCACGGAGGAAGAAGTCCCAG
GACGGCAAGGGCTGCCTGCTGGACAGCTCCGGCATGCTCTCGCCCGTGGACTCCCTGGAGTCACCCCATGGCTACCTGTCAGACGTGGCCTCGCCGC
CACTGCTGCCCTCCCCGTTCCAGCAGTCTCCGTCCGTGCCCCTCAACCACCTGCCTGGGATGCCCGACACCCACCTGGGCATCGGGCACCTGAACGT
GGCGGCCAAGCCCGAGATGGCGGCGCTGGGTGGGGGCGGCCGGCTGGCCTTTGAGACTGGCCCACCTCGTCTCTCCCACCTGCCTGTGGCCTCTGGC
ACCAGCACCGTCCTGGGCTCCAGCAGCGGAGGGGCCCTGAATTTCACTGTGGGCGGGTCCACCAGTTTGAATGGTCAATGCGAGTGGCTGTCCCGGC
TGCAGAGCGGCATGGTGCCGAACCAATACAACCCTCTGCGGGGGAGTGTGGCACCAGGCCCCCTGAGCACACAGGCCCCCTCCCTGCAGCATGGCAT
GGTAGGCCCGCTGCACAGTAGCCTTGCTGCCAGCGCCCTGTCCCAGATGATGAGCTACCAGGGCCTGCCCAGCACCCGGCTGGCCACCCAGCCTCAC
CTGGTGCAGACCCAGCAGGTGCAGCCACAAAACTTACAGATGCAGCAGCAGAACCTGCAGCCAGCAAACATCCAGCAGCAGCAAAGCCTGCAGCCGC
CACCACCACCACCACAGCCGCACCTTGGCGTGAGCTCAGCAGCCAGCGGCCACCTGGGCCGGAGCTTCCTGAGTGGAGAGCCGAGCCAGGCAGACGT
GCAGCCACTGGGCCCCAGCAGCCTGGCGGTGCACACTATTCTGCCCCAGGAGAGCCCCGCCCTGCCCACGTCGCTGCCATCCTCGCTGGTCCCACCC
GTGACCGCAGCCCAGTTCCTGACGCCCCCCTCGCAGCACAGCTACTCCTCGCCTGTGGACAACACCCCCAGCCACCAGCTACAGGTGCCTGAGCACC
CCTTCCTCACCCCGTCCCCTGAGTCCCCTGACCIGTGGTCCAGCTCGTCCCCGCATTCCAACGTCTCCGACTGGTCCGAGGGCGTCTCCAGCCCTCC
CACCAGCATGCAGTCCCAGATCGCCCGCATTCCGGAGGCCTTCAAGTAA
HUMAN SEQUENCE - CODING
ATGTACGTGGCGGCGGCCGCCTTTGTGCTTCTGTTCTTCGTGGGCTGCGGGGTGCTGCTGTCCCGCAAGCGCCGGCGGCAGCATGGCCAGCTCTGGT
TCCCTGAGGGCTTCAAAGTGTCIGAGGCCAGCAAGAAGAAGCGGCGGGAGCCCCTCGGCGAGGACTCCGTGGGCCTCAAGCCCCTGAAGAACGCTTC
AGACGGTGCCCTCATGGACGACAACCAGAATGAGTGGGGGGACGAGGACCTGGAGACCAAGAAGTTCCGGTTCGAGGAGCCCGTGGTTCTGCCTGAC
CTGGACGACCAGACAGACCACCGGCAGTGGACTCAGCAGCACCTGGATGCCGCTGACCTGCGCATGTCTGCCATGGCCCCCACACCGCCCCAGGGTG
AGGTTGACGCCGACTGCATGGACGTCAATGTCCGCGGGCCTGATGGCTTCACCCCGCTCATGATCGCCTCCTGCAGCGGGGGCGGCCTGGAGACGGG
CAACAGCGAGGAAGAGGAGGACGCGCCGGCCGTCATCTCCGACTTCATCTACCAGGGCGCCAGCCTGCACAACCAGACAGACCGCACGGGCGAGACC
GCCTTGCACCTGGCCGCCCGCTACTCACGCTCTGATGCCGCCAAGCGCCTGCTGGAGGCCAGCGCAGATGCCAACATCCAGGACAACATGGGCCGCA
CCCCGCTGCATGCGGCTGTGTCTGCCGACGCACAAGGTGTCTTCCAGATCCTGATCCGGAACCGAGCCACAGACCTGGATGCCCGCATGCATGATGG
CACGACGCCACTGATCCTGGCTGCCCGCCTGGCCGTGGAGGGCATGCTGGAGGACCTCATCAACTCACACGCCGACGTCAACGCCGTAGATGACCTG
GGCAAGTCCGCCCTGCACTGGGCCGCCGCCGTGAACAATGTGGATGCCGCAGTTGTGCTCCTGAAGAACGGGGCTAACAAAGATATGCAGAACAACA
GGGAGGAGACACCCCTGTTTCTGGCCGCCCGGGAGGGCAGCTACGAGACCGCCAAGGTGCTGCTGGACCACTTTGCCAACCGGGACATCACGGATCA
TATGGACCGCCTGCCGCGCGACATCGCACAGGAGCGCATGCATCACGACATCGTGAGGCTGCTGGACGAGTACAACCTGGTGCGCAGCCCGCAGCTG
CACGGAGCCCCGCTGGGGGGCACGCCCACCCTGTCGCCCCCGCTCTGCTCGCCCAACGGCTACCTGGGCAGCCTCAAGCCCGGCGTGCAGGGCAAGA
AGGTCCGCAAGCCCAGCAGCAAAGGCCTGGCCTGTGGAAGCAAGGAGGCCAAGGACCTCAAGGCACGGAGGAAGAAGTCCCAGGACGGCAAGGGCTG
CCTGCTGGACAGCTCCGGCATGCTCTCGCCCGTGGACTCCCTGGAGTCACCCCATGGCTACCTGTCAGACGTGGCCTCGCCGCCACTGCTGCCCTCC
CCGTTCCAGCAGTCTCCGTCCGTGCCCCTCAACCACCTGCCTGGGATGCCCGACACCCACCTGGGCATCGGGCACCTGAACGTGGCGGCCAAGCCCG
AGATGGCGGCGCTGGGTGGGGGCGGCCGGCTGGCCTTTGAGACTGGCCCACCTCGTCTCTCCCACCTGCCTGTGGCCTCTGGCACCAGCACCGTCCT
GGGCTCCAGCAGCGGAGGGGCCCTGAATTTCACTGTGGGCGGGTCCACCAGTTTGAATGGTCAATGCGAGTGGCTGTCCCGGCTGCAGAGCGGCATG
GTGCCGAACCAATACAACCCTCTGCGGGGGAGTGTGGCACCAGGCCCCCTGAGCACACAGGCCCCCTCCCTGCAGCATGGCATGGTAGGCCCGCTGC
ACAGTAGCCTTGCTGCCAGCGCCCTGTCCCAGATGATGAGCTACCAGGGCCTGCCCAGCACCCGGCTGGCCACCCAGCCTCACCTGGTGCAGACCCA
GCAGGTGCAGCCACAAAACTTACAGATGCAGCAGCAGAACCTGCAGCCAGCAAACATCCAGCAGCAGCAAAGCCTGCAGCCGCCACCACCACCACCA
CAGCCGCACCTTGGCGTGAGCTCAGCAGCCAGCGGCCACCTGGGCCGGAGCTTCCTGAGTGGAGAGCCGAGCCAGGCAGACGTGCAGCCACTGGGCC
CCAGCAGCCTGGCGGTGCACACTATTCTGCCCCAGGAGAGCCCCGCCCTGCCCACGTCGCTGCCATCCTCGCTGGTCCCACCCGTGACCGCAGCCCA
GTTCCTGACGCCCCCCTCGCAGCACAGCTACTCCTCGCCTGTGGACAACACCCCCAGCCACCAGCTACAGGTGCCTGAGCACCCCTTCCTCACCCCG
TCCCCTGAGTCCCCTGACCAGTGGTCCAGCTCGTCCCCGCATTCCAACGTCTCCGACTGGTCCGAGGGCGTCTCCAGCCCTCCCACCAGCATGCAGT
CCCAGATCGCCCGCATTCCGGAGGCCTTCAAGTAA

[0301] TABLE A

| | Ser. No. | | | | |
|---|---|---|---|---|---|
| Docket No. | Filing Date | Inventor(s) | Examiner | Art Unit | Title |
| CHIR0021-100 | 10/035,832 | David W. Morris et al. | n/a | 1642 | NOVEL COMPOSITIONS AND |
| PP23698.001 | Dec. 26, 2001 | | | | METHODS FOR BREAST |
| | | | | | CANCER |
| CHIR0022-100 | 10/085,117 | David W. Morris et al. | Sean E. Aeder | 1642 | NOVEL COMPOSITIONS AND |
| PP23697.001 | Feb. 27, 2002 | | | | METHODS FOR CANCER |
| CHIR0023-100 | 10/087,192 | David W. Morris et. al. | Alana M. Harris | 1642 | NOVEL COMPOSITIONS AND |
| PP23696.001 | Mar. 1, 2002 | | | | METHODS FOR CANCER |
| CHIR0024-100 | 09/997,722 | David W. Morris et al. | Sean E. Aeder | 1642 | NOVEL COMPOSITIONS AND |
| PP23794.001 | Nov. 30, 2001 | | | | METHODS FOR CANCER |
| CHIR0025-100 | 10/105,612 | David W. Morris et al. | Alana M. Harris | 1642 | NOVEL COMPOSITIONS AND |
| PP23694.001 | Mar. 20, 2002 | | | | METHODS IN CANCER |
| | | | | | ASSOCIATED WITH ALTERED |
| | | | | | EXPRESSION OF MCM3AP |
| CHIR0026-100 | 10/004,113 | Eric K. Engelhard et al. | Alana M. Harris | 1642 | NOVEL COMPOSITIONS AND |
| PP23878.001 | Oct. 23, 2001 | | | | METHODS FOR CANCER |
| CHIR0029-100 | 10/034,650 | David W. Morris et al. | Sean E. Aeder | 1642 | NOVEL COMPOSITIONS AND |
| PP23793.001 | Dec. 20, 2001 | | | | METHODS FOR CANCER |
| CHIR0030-100 | 10/105,871 | David W. Morris et al. | n/a | 1642 | NOVEL COMPOSITIONS AND |
| PP23685.001 | Mar. 20, 2002 | | | | METHODS IN CANCER |
| | | | | | ASSOCIATED WITH ALTERED |
| | | | | | EXPRESSION OF KCNJ9 |
| CHIR0031-100 | 10/105,637 | David W. Morris et al. | Sean E. Aeder | 1642 | NOVEL COMPOSITIONS AND |
| PP23695.001 | Mar. 20, 2002 | | | | METHODS IN CANCER |
| | | | | | ASSOCIATED WITH ALTERED |
| | | | | | EXPRESSION OF PRDM11 |
| CHIR0035-100 | 10/052,482 | David W. Morris et al. | Alana M. Harris | 1642 | NOVEL COMPOSITIONS AND |
| PP23796.001 | Nov. 8, 2001 | | | | METHODS FOR CANCER |
| CHIR0037-100 | 10/105,613 | David W. Morris et al. | Sean E. Aeder | 1642 | NOVEL COMPOSITIONS AND |
| PP23693.001 | Mar. 20, 2002 | | | | METHODS IN CANCER |
| | | | | | ASSOCIATED WITH ALTERED |
| | | | | | EXPRESSION OF TBX21 |
| CHIR0038-100 | 10/105,948 | David W. Morris et al. | Alana M. Harris | 1642 | NOVEL COMPOSITIONS AND |
| PP23686.001 | Mar. 20, 2002 | | | | METHODS IN CANCER |
| | | | | | ASSOCIATED WITH ALTERED |
| | | | | | EXPRESSION OF PRLR |
| CHIR0040-100 | 10/020,508 | David W. Morris et al. | n/a | n/a | METHODS AND |
| PP23650.002 | Oct. 29, 2001 | | | | COMPOSITIONS FOR |
| | | | | | INSERTION MUTATION |
| | | | | | SCANNING (IMS) OF |
| | | | | | GENOMES |
| CHIR0051-100 | 10/394,948 | David W. Morris et al. | Quang Nguyen | 1636 | NOVEL COMPOSITIONS AND |
| PP23371.002 | Mar. 21, 2003 | | | | METHODS IN CANCER |
| CHIR0052-100 | 10/322,281 | David W. Morris et al. | Alana M. Harris | 1642 | NOVEL COMPOSITIONS AND |
| PP23370.001 | Dec. 17, 2002 | | | | METHODS IN CANCER |
| CHIR0054-100 | 10/331,053 | David W. Morris et al. | Teresa E. Strzelecka | 1637 | NOVEL COMPOSITIONS AND |
| PP23369.001 | Dec. 26, 2002 | | | | METHODS IN CANCER |
| CHIR0055-101 | 11/064,736 | David W. Morris et al. | n/a | n/a | NOVEL COMPOSITIONS AND |
| PP23350.0002 | Feb. 23, 2005 | | | | METHODS IN CANCER |
| CHIR0056-100 | 10/330,773 | David W. Morris et al. | n/a | n/a | NOVEL COMPOSITIONS AND |
| PP23367.001 | Dec. 27, 2002 | | | | METHODS IN CANCER |
| CHIR0059-001 | 60/506,304 | David W. Morris et al. | n/a | n/a | RHO ANTIBODY AND TAG |
| PP23360.001 | Sep. 25, 2003 | | | | TO PURIFY CELL SURFACE |
| | | | | | PROTEINS |
| CHIR0060-001 | 60/507,682 | David W. Morris et al. | n/a | n/a | NOVEL SPLICE VARIANTS OF |
| PP23359.001 | Sep. 30, 2003 | | | | HUMAN |
| CHIR0062-100 | 10/692,382 | David W. Morris et al. | n/a | n/a | NOVEL COMPOSITIONS AND |
| PP23356.002 | Oct. 22, 2003 | | | | METHODS IN CANCER |
| CHIR0063-100 | 10/674,575 | David W. Morris et al. | n/a | n/a | NOVEL COMPOSITIONS AND |
| PP23355.0001 | Sep. 29, 2003 | | | | METHODS IN CANCER (AS |
| | | | | | AMENDED) |
| CHIR0065-100 | 10/883,878 | David W. Morris et al. | n/a | n/a | NOVEL COMPOSITIONS AND |
| PP23349.001 | Jul. 1, 2004 | | | | METHODS IN CANCER |

The application's sequence listing, which the Patent Office published only in electronic form, follows.

SEQUENCE LISTING (61 sequences)

SEQ ID NO: 1 - DNA, 32767 bp, Mus musculus
  misc_feature (2178)..(2262): "n" at positions 2178 through 2262 can be any base.
  misc_feature (14746)..(15383): "n" at positions 14746 through 15383 can be any base.
  misc_feature (28120)..(30598): "n" at positions 28120 through 30598 can be any base.
  misc_feature (32397)..(32767): "n" at positions 32397 through 32767 can be any base.
cctctcaaactcttggtaattctcctgcttcggcacgctggggactgggactacacctgtgtgccaccatggctggctatttctctctcttgaacactggaagagtgctcagagtttactggatctgggagaagctcgaggctgggttatggaagccggctctgcttgctccagctcagggaggagttgcctgagggccaggcacttcgaaggacagatgggacccaaggccagacactgggccccagctcaccagaagtggagccctgactgtctctgagagggtaagctggggtggctgccaggcgggcaaggccaaagcctggcagcagccggtggcccctcttctggcagagatatcttggcatgagcctggctctgcccatgacactaaagtgccctcttaattagccaggctcttgccaagcactggccacgattgccttgtttcacagaattcaccttggactggcacagatggggagggtggatagcccggtgttttgtctttcttctaggggagctgggctcaagggcaggactcctgggccagcccaggtttttccctcagaaaccacagcatgaatactggcatgatggagcacacctgtaatcagcagaaattgagacaggaagattgttgagaatttgaggccaacctaggctaaatagggagaccctatctctacacactccccctccccccgcccctggaaatgctggagggtctggggaagatggctcagtggttaagggcacttgctgctcttgcaggggacccaagtttgattcccagcatctataacttggtggctcacaattccagttccaggcactctgacaccttcctgtggtctgcaaggcacctgcattcattctcacgtgcatgcgcacacacatgcgcgcgcgcacacacacacacacacacacacacacatctcataaatacaaataaaataaatcttgaaaacaacagtgacaacaacacatgctgaacatggtggtgctcctgacatggtggtgctcctgacatggtggtgctcctgacatggtgatgctcctgacatggtggtgctcctgacatgatggtaagcctgacatggtggtgctcctgacatggtggtgctcctgacatggtgatgctcctgacatggtggtgctcctgacatggtggtaagcctgacatggtggtaagcctgacatggtggtgctcctgacatggtggtgctccctgcactgacagttctgaggaggtggagataggaggatccagacttggaagcttgcctgagatagaccctgtctcagaataggctggaggctgcctctgcccttttgcttctatctctttttccatatgtgtgtgtgcgtgtgtgcatatgtgtatgcatatttgtaagtatatgtatataaataaacacacacacacacaaacttactctgtatactaggctggccttgaactcagagacctgcctgtttctgccttcccagtgctgggattaaaagcgtgtgccatgggctggtgagatggctcagtgggtaagagtacctgactgctcttccaaaggtccagtgttcaagtcccagcaaccacatggtggctcacaaccatccgtaacaagatctgacgccctcttctggtgtgtctgaagacagctacagtgtacttaaataaataaatcttaaaaaaaaaaaaaaaaaaaaaaaaaggcgtgcaccaccactgcccggctagttagctttatcttccgtggatgttttgtctgcagtatgtctgagtgagggtgtcagatcctctgtaactggagttatagacagttgtgagcagccatgtaagtgctgggaattgaatccgggttctctggaagagcagttcatgctcttaagcactgcgccatctctccagctgtccttatttatttttaagggtctcttgtagccatacaggccagaaacccaccattagccacggaccttgagctccaagtgctgggtgacaggcccgcatctctcctggtttgtgatctgctagggatggggtctaggacctcacacaggctgcataagcattcccctcacccaccctcatccccacccagtcctggacaggctctggctgtgtaggctggtctcctcctttctatccccctgcctcagcctcctgagtgctgaggnnnnnnnnnnnnnnnnnnnnnnnnnnnnnnnnnnnnnnnnnnnnnnnnnnnnnnnnnnnnnnnnnnnnnnnnnnnnnnnnnnnnnctgtggtggctcccgagtgctgtcatcccagcactggggaggttgaagcaggaaggagaatcacaggttcaaggccagcttggtttacttgagactctgtctcaaaaagaccaaaccagggactgggaggatggccagtaaaatgcttttccagctatcgagggaacctgagtttcatcctggaactcatacaaaaagctggctgtggtcaggtggcgcatgcctttaatcccatcactcaggagacagaggcaggcagattcttgagttcgaggccagcctggtctacagactgagttccaggatagccaggtctacacagagaaaccctatcttggaaaacaaaacaaacaaaaaaaactaggtgtggctagcctgtaaccccagtgctgggtaaacaggggcaggtgaatacatctccgggattcgccagcctgtcctatctatgagctctaggtctggggagacagcctgtcaaatcaatgcaagcaggtgacaaccgaggaaagacacccaaggttgatgcacgggcaagtgtgcacacacacacaccacagcaaacaaaaactaacaaaacccaaaccatattttgctgtggtggtggttgttaaattttatttattctgtgtgtatgggtatttcacctgcatgaatatctacctgtgtagcatatacatgccgggtactttcggaggtcagaagaggacatcaaatcccgtagaactggagttacagaaaatgaacttgtggcttctgggaatctaacttggatcctctaaaggacaggcaggactctgaattcttgagccacagatacagctttccaaacccatgttttgtaagagccaccaggcctgaaaactctgggccatgtcccgtttgttgtgtctaggcctcagtttcctggaaggcagagaatgcgtaggtccgttgttagtggagacagcagtggtggtaacagcctggtctaccctcttggtcagagggaggcaggcggagagtaactcagggcctgggggcaacacccagctgggcctggggctagtgggggctcagccaggcaggacgtgggtcctcctacttcctaagctctgatgggcaagtggtgccagtggtaccaggctgccctgaggggcccttagagcaggtgaccacagagccacaaagaggctattcatggcctccggttcacgaggctgcccctttattgagggcttgaaccacagaaagctgtgtggtctgcagggaagctagttctgagctgtctggccagctacagtagtgtgtgtgtgtgtgtgtgtgtgtatacacatggtacttttttctatctatctatctatctatctatctatctatctatctatctatctatctatctttgtgtctatgtatctaataataaattgatctatttaactatgtagatatcaatccattgatctatgtatctatcaactgatgtgtatgtatgtatggatgtacctacatgcgtacttgaggcaggacttaaagtagcccaggctagccttaccacatttcatagcagaggatggtcttgaacttcaggtcctcctgtctctacctcgtgagtgctgggattacaggtttgtgccaccacgcctggcttaggaggttctgtggttagaatccaggatttcactatcaactgggccacatcgtcagccatattcaatatgctttcttttacattcttacttatttactacaaatgggtcccaggaaccaaggtcggcaagcctgatggtgagtgctcttccctgctggctgacttatttgctcttttttttttttttttttttttctagacagggtttctctgtgtagccctggctgtcctggaactcactttgtagaccaggctggcctcgaactcagaaatctgcctgcctctgtccccaaccccacccccagtactgggattaaaggcatgcgccacacgcccagctcttatttgctcctttgaattaaggtctcatgtacacaaggctgaccgttcatgcacaatacagctaaggcttgctttgaatttctcagtttctttcttctacccaacagtttctgagatttcaggtccgtcctatgtcatgcccaggttttttgtttgtttgtttgtttgttttttggttttgttttgctgtttttcaacacagagtttctctgtggaaccctggctatcctggaactctgtataccaggctgtccttgaactcagagaccctctgcctccctagtgctgggttaaaggtccctgccatcaccgtgaaacttaagcccagcttctcatttggtggctggaaatttgcctgcctctgcctctctccagctgcctagcactgatgtctggttgagagcaggggaaactgaggtgccgctaggacaagatctcatgcaaccgtgaacagccctactgagccatcctcctgggacagcctctcaggccaggccttctgtgtcttctgctatagtagcagtacaaagttgacacaaccttgctcttcccagcagctgggagttcctgagaagtgtaaatgaggtttccaggaaagccaagaggtgagagactgaaaagttggagggataagggggtgcccatcaagctgcagtggagacttgttatctgttgcgcatccctgacatctcagcaggaggatcaggagttcaagggcatcctcagcaacatagtaagtctatggagctagcctgggctacacagatgccattacaaaaaaaaaaaaaaaagtaaaaaaaaaatcttgggatatgggggatgggtgggtgaactgtgtagcccagggagtcactactggttcctttggaagtccctgttctgcatggagatcatggagattctggggacactccaggagtcctccttcagggaactaagttggggagcagggcagcctatcctgtggccttatttcctgtctggtgcaagcgccaggcaaggcatccagccaggagcgactcaggcctgacctccgctaactgttctgttttgtgctgcaccctcatctcagcagggatcaggtggcacttgggtccccaggggatccagggacacagtgtccatgtccccatctttccccacagggacctggggcagggccgaagaggagacctcgtgatgtgtacaggtgtagctcatccctccgaggactcaggggacacttggggaaggtgtgacacagagcaggctggagctctgtgcggctctttattaagtgtgcctacaacaggggcagagacacagcagcgacaatgataacagcccactcccaaccgaagctcaatggttaccagactcagccaactgcagaattccagtccataacggcacctcctttcctttctcaggagcttaccagagaggtctcaccccaagccttcaccccatctagagcaaatgcttatatcccccatgtttgctcagagcagagcatggagggaccttcctgtcaccagaggcagaggcattctgtatacgtgcatacacgcctctgtgtgtgtgtgtgtgtgtgtgtgtgtgtatttggtacagatctaagcatagaaaattgaaaagcattgaggttggtgattgaaaggctcactgatgggcaagtcgggttcgagtgcgctaactgtatgactctatggatccgaatatcatgctgttttggaaaggaatgagggagctactgtttctaaggaagagaagaatgggcaccaagacatagggagggaaggtgggacagtaagcacttacagccgaagcccaagacctggaacccaaggggaaaaacaggtgtggccaggcttggtggcacgcgcctttagtctctgagttcaagtccagccaggattacatagcaaaactttccctcaagaaaaaaggtaggggctggagagatggctcagcagttaagagctcttccgaaggtcctgagttcaaatcccagcaaccacatggtggctcacaaccatctgtaatgagatctgacgccctcttctggtgtgtctggagacagctacagtgtacttacatataataaataaataaatcctaaaaaaaaaaaaaaaagaaaaagaaaaagaaaaaaggtagaggaggaggaagaggaggaggagacggcaagacaaaactaactacatagctgggggaggtggtgcttgcctataatcccagcacttggaaggctgaaagaggaaatcaggagttcctatgcagctttggcttatgtgagcctttctcataaaaccaagagcaaaaaagcaaaacatgaggtggtaactcagctggagagtgcttgtctagattccctcagtgaggggctggggtgtgactcagtgcctagaatcccccagggaggggctgggggcgtggctcagtggtagagcccctgcctagaatcccccattgacgggctggggtgtggctcagtaacagactgctcacctaagatgttcaaggccatgactttcattgaaaacatcacaaaacaaacaaaaccatcagtgaggttgaatgtgtatccatgtttgcttgtctccatttaaagaacacctggaagatctctagctgctggtggaggcgggagggtgaaggctgcttcatcctttgtatttgaactgtgtggctgtgggtgtattatctgttcccaaggactgcacatgaaatgagaacaatgaaggcttcggttctgctgagatgaacctcaattctccacagatgatctcacccagagccagatggaagtcccccaacatttaagcctctgttctgagtgctggacccaaactcatcttaagggaaaacccaaagagcctttctgtggtttccttccacaactgtctttcaatgtgtgtatgtgtgcacgtgtgtttgcttgtgtgtgtgtgtgtgtactatgtgcatgtgtgtgagcatgtgtgtatatgtatgtgcatgagtgtgtgtgtgtgtgtgtatacatgtgagcatgtatgtataggccagaggttagtgatgggtaactttctccagagctctccaccttagttttattgtctgtgtgtgagcggctgtgggcactgtacaccacagcacatgtgtggaggtcagagaacaacttgtggctgtcacttctctccctctgtgtgggtctaagacctggatccagcgctttcgcttgcttgagacatctcgttgactagctcctccgttgttaacacagggtctcactatgtaggtccagttatcttggaatttgctctgtagaccaggccggcatcaaactcagagatagacctgcctttgcctccagagtactgggattaaaggtgtgcaccactaccacccagtttaaaattctaaaaagatttgtgggtgcagggatttgaggaggccaggagagactgttggatctctgggaactggagttagaggtggttgtgagcccccacgggtgctgagaactgaactagggtgcttgagaggagctcactcactgctgagcccccactttagatttgagtccctcgtactgaagctgagttcagtgatttggctgagctgaccgctcagggtgggcttttcgatgtgcaccacaggcctggctttataggtgaggtcatgcttgcacaactggccttttggtgactcagccaactccccagaccttttttcttttgcatttacgtgtgtgtgtgtgtgtgtgtgtgtgtgtgtgtgtgtgtgtgtacatgaagtgagagggggcagtctgggaagggtcagtggacaacttaagggagttggttttgccttccatcatgatggtctagagactaaattcagcccctcagcctgggagcgtgcctttaccctccgagctcccagctttgggtttttgaggcaaggtttcatatagcttaggctggcctggcattcaaggtcatctcagaggcctaggatgaccttgtgttgtcggttctccggcctttacctctggtgtgctggcgtttgccttaccacacccaggcatcccccatagcttaagcctaaagctctcggatggccagcacgcccatgccctgacgtgaagttcagtgactaatcaatacagagcgttcacggagccctgacacatagcagcattgacttaaccttaacagcctggtgtgtaatgaggccaacttgtccgattctgcccacgatgcgatgctctgggttaaacaggtttgaacagagtaccggatggcagggagggcaccctcagtacagggttttggctgttactgcttccagtctcctgacctgctcccccaaggctggtcttaaactcaaagcaatcctcctgtccctgcttctcaagttctggaattacaagtgtgactcactgtacccaggaatatgtgtctttattacagaggaaggagagctcagagagtgagagtaacctgtgcaaagtcccacagcaggagagggtggctggctatcggccgtgaacttggtgacctttcctgtgacctctaagggaggaactagatgtcccagcaaggattctagggacttgtcaggactgacctttgatgatgggaaagccatgccatctccccttcccctttgatggtcgctggaggggtttgcctgggacagagatgtgtttggacacagatcaccgtgaagactggtcagtttcagtaccctgcccagcctgtggctgggaagggccaggggcccagatcttgtgggcagcctggggtagggccagcattccaggggcctgcctggcatgtggggaatgtcccaggagaagtctcagtcctccagaaactcaaagggaagtgttcttacgtggggtggtgtgtggtgggaggtgggaggtggtgtttgtgggaatgtccctctggtctggaaccctgaggggctgcagttaggaggtacattggggctgtgccattctagggagctgacctgcttttctgatgtcttcataaacagagaccactattcctgccttacctaccctgcttcctggtagaccagcaccccggggcttgagcatcaccacagtagggacttttgtgggccactgacttgggccacagttaccacaatttatttagagtcagcaaggtggctgtactctatgctgacccgggaatagaaatctcggtttctgctcaggaggcccaggctacaaggccttgaaaaaccctgaggcgggcggggcaggtagggctctgcatgcgcctctctagaaattaacctcctttctaccccagacccttctggcgtctctggcttcttcaaggaccggctctaaggctacttcctggtacaccctggaccctccctccatcctgaagggatcattatcttaaacctggtccttcccatcgactgggtttgggggtaggggtgtttcaggatggcctcagagagcaggagaaagttggagatcagccaactactgcagagcacgactgtggaggaacagttaaatggactagcaaacacgaacgggccagaggcagaaggactgctatgagttcgagtccagcctgagccacacagatacttcaagcctagtctgagttacagagtgagacccggtcttaaaccccagaaaaacactccggggaagcgcaggggaccgggcgcgcgctgcagagccccctccccggcaggcccgggtaggggcgtggccacggtgacgtcatcctcctataaaaccctgggcgccgccgggctggctttgtggagaactgcagcgggctaagccgtgttgaacaaaggaggtcgggcacagctatccaagctcccggggccaccgggccgccctccgccaccatgaccgccaacggcacggcagaggctgtgcagattcagttcgggctcatcagctgcggcaacaagtacctgacagccgaggcgttcgggttcaaggtgaacgcatccgctagtagcttgaaaaagaagcagatctggacgctggagcaacctcccgatgaggcgggcagcgcggccgtgtgtctgcgcagccacctgggtcgctacctggccgccgacaaggacggcaacgtgacctgcgagcgcgaggtgcccgacggcgactgccgctttctcgtcgtggcgcacgacgacggccgctggtcgctgcagtccgaggctcaccggcgctactttggcggcaccgaggaccgcctgtcctgcttcgcgcagagcgtgtcgccggccgagaagtggagcgtgcacatcgccatgcacccgcaggttaacatctacagcgttacccgcaagcgctacgcgcatctgagcgcgcggccggccgacgagatcgcggtagaccgcgacgtgccttggggcgtcgactcgctcatcaccttggccttccaggaccaacgctacagtgtgcagacgtccgaccaccgcttcctgcgccacgacgggcgccttgtggcacggccggagcccgccacgggcttcacgctggagttccgctccggcaaggtggcctttcgcgactgcgaaggtcgctacctggctccgtccgggcccagcggcaccctcaaggctggcaaggccaccaaggtgggcaaagatgagctcttcgccctggaacagagctgcgctcaggtggtgctgcaggcggccaacgagaggaacgtgtccacgcgccagggtgagttggggacatgtcccctcccttgggtcctgacccagtgcacaaaagcatctctgcactccttctatttccctatttcctcctgggctccctttaggctcacaggcctctgggctccgccatggggaggtgggcttctattttgaaagacctgatctcaccagatagccttggctatcctggaactcgctatgtagactgggctggccccgaactcgcagaaatcttccttcctgtctcttgtgctgggaataaaggcatgtaccacccctctgttcaggacgtaggcttcttctgctgggagaaggtgacgtggggaagtgggtaaggcctaacacattctaaagcaatactgtccaccaccacccccccacccccccacccccccggctgggggcgtgggactccatagacctagcttagatcttctccgtttcctcttccttcccagtctgagccatccccattcatgagccgattctttaggataggctgtcccaggtcttggagaggaagggttccccctacacccccccttgttcatttcctcgtgcgtcctctcccgtttcgcgggcctttggctggagggccaggggacagtcacccctgccctccccgccttaaatggcgagatagaggaggttggaggggcttttgatcccggcggggtgtgctgggcggggtcggccctgcgactcttggtggtggtggggttgtccgtaggggcttcccctcccccactccatctcccctcgctaaggcctggcgctccgggccgcggcctttgtgagcaggggggcgggtcgccacggctgggccctccctcgtcccctttgtcctgctaaggctctgcagatgggaaaaccagatgcggcggagctgggggaggggatcggcttaggcgggtccctctgcggaagagccacccccaaccctccaggcgttgtccctggtccagggttcattgagaaggcgcggagtgaagccgcctggctcttccttcgcaccccggctggcaggcggcgtggcgcgggtggctgcgcgccaggcgccctccctgccctcctatgcacgccttgcggtccggcactcggcggagtgtccctccaaaagcctctactctcgagtgaaccggtccccaaggcctctctggctgggaacaaccgtttgcagctctatttgtccccatccagggcctccagcaggctggcaggccatttccgaccggcatgggcatggtacaagtaggcgcctcctttctggcgtacccccgactcttcaaagggtctttgctgcctgctggtaggggcttgtgagatctcgcttccttggttgggaaactgaaccccaggctttggagatagctggatgggagccagtctgtggggaggaagacccccctcccccaatgcagagggcaaagccttgggtggggcctgcttgagtttggctgaataacgctcagaaaagtgcgaccatttgcttactgttacacagtaagtcagcaccatgctgaactgggtgtacttgatgccagaatgttctctcattatacacacacacacacacacacacacacacacacacacacaccaatgaaccatggcctctcttgtttcacagtgctgggcgagggggtcagagttcccacctgtttagcaaacattgagatacgagctgcggtaaacgtctcttgggaatgtgactggtatgtaaagcagaagattgggggtacaggatcggggtagtagattataaagatctggggtcccttctgaggacccaggagctgccccaggagagtgaatagaaatgagcatgcaccaagtttatggactggttttgcaggcaggggcctcagcaaaggcccggaggcagggagttgcaaatagagaagccctgcatagctaggaggaaggctgggattggagggaatcctgcagatgacgggtactccagagcctagagagaccagctctctgcttacagagctgtggccgaggcttgtgccctggggaaggttaggcaaggcacaggtgacttgggcccttggggcctgaaaggagctagagggtgtgttttgcgagcctggacaggtacccttttctgagggtgccatgattgtgcatgattcacactgatgcggcaggagggggcgggaattgaaggggtgagaatctgacgggaacttggggtcacacacagtcagacctcttctgccctcctatgtctgggtccaagtctcattcccgagtcagccaactcctcccccggctttttgagggtgagctgttgggtgggtgtgccggggaggccattttgggcaggcttgcgtggcagggaggcggggctgggcttcggggaaacacgtgttgaactgctagccaggagtagggagagggaaggctcaatctggtctggggttgtgaatcttccatgcagatttgctgcttccggcttcctggcctcagtttccccatctgaaagcacagaggtacattgagccaggatcttcctgggaggtggagatcctatgagagtaggatggggggtagtgggtagggtcttttcctccttgcttctcatgaccctcccaagcccctgctggctcaaggagaccccgtgctatgtctccccacactgcccaccctggcttacttgttgggttctaatgctttcaaagaattttgtccccatcatttctagggcggctggctaagaatgagtgacaggtgaggctgggctttgtagggtatccttttgacggcttccctcttgggtcgaggaatggcttagttttgagcactgtacgactttgggcggtgaagtcctggagggttctaaactaagccgccttctgggttgtgaggattgcttatttcgaacaacaacgctagggagtctggcaaacagctaagcccaggaagggggttgcgggttagaggaccctctgagtcaccgcagagacgcctaggaagctggaagacagccacgccccctccgtgggctcctaggagccagtgactcaggttttctgtgctgctgctgctgaaaaaaaaaaaaatcccacagaaaacctgttaccatagcaacgcagctccaatatgattccaaggccaagtggggcctttccccctggctgagccttagagggcccattctggaagggggctaacttccctttccggctgaggtgggagggcccaccatctccttggcaacaggccctcacgtcctttcacggtcccaacagaattgagaggcgattctttttggcaagggagggaaactgaggcagagagcggagaagacattccccgaagggtgcctggagtccacctttggtgccttggtggcctctttattaaaaagtggttgcacaggcccctttgttccagtacctggagatgagacccacatggtgaggccctttttgttctctgtctggacgtctcatttttcagaggtactgggaggttgaaggttggtgtatgtccacagcactgtgctgtcttgaactcagtgcgcatgacatcttgggccagggcctctcctttgtgtgagggaagctagcatgctgggaaactccgactcctttagtccacccactttagttgtagtttttgtcttgtagcccatctggcttccaactctccatcctcctgcctcagtctccagggtgcggcgatgacaggcataggtcaccacaggcttctggcctccacttgatggttgccggagtggctgggagtggcttttcttttcttttcttttcttttctttactttcaggcagggtttatctgtgtagtccggctgttctggaactatgtnnnnnnnnnnnnnnnnnnnnnnnnnnnnnnnnnnnnnnnnnnnnnnnnnnnnnnnnnnnnnnnnnnnnnnnnnnnnnnnnnnnnnnnnnnnnnnnnnnnnnnnnnnnnnnnnnnnnnnnnnnnnnnnnnnnnnnnnnnnnnnnnnnnnnnnnnnnnnnnnnnnnnnnnnnnnnnnnnnnnnnnnnnnnnnnnnnnnnnnnnnnnnnnnnnnnnnnnnnnnnnnnnnnnnnnnnnnnnnnnnnnnnnnnnnnnnnnnnnnnnnnnnnnnnnnnnnnnnnnnnnnnnnnnnnnnnnnnnnnnnnnnnnnnnnnnnnnnnnnnnnnnnnnnnnnnnnnnnnnnnnnnnnnnnnnnnnnnnnnnnnnnnnnnnnnnnnnnnnnnnnnnnnnnnnnnnnnnnnnnnnnnnnnnnnnnnnnnnnnnnnnnnnnnnnnnnnnnnnnnnnnnnnnnnnnnnnnnnnnnnnnnnnnnnnnnnnnnnnnnnnnnnnnnnnnnnnnnnnnnnnnnnnnnnnnnnnnnnnnnnnnnnnnnnnnnnnnnnnnnnnnnnnnnnnnnnnnnnnnnnnnnnnnnnnnnnnnnnnnnnnnnnnnnnnnnnnnnnnnnnnnnnnnnnnnnnnnnnnnnnnnnnnnnnnnnnnnnnnagagagagagattgggactgactggtcccagttctggctttccctgactgttccattccccgcagtgggcacggttagatcaggtggggtcacttaggctcgctagcattgggtgtggctcttttctgcccagtatgctgtgctaactcagctgtccctgcacgtggcaggtcaattacaggtaggctgaggggacagtgggtgacaccctgtatatgtgtagccaattgttctcttaatatttagccatccctagtgtgggccaggggcaggagagccatttctgcctgagaaggttgaacagactacagcccagagctgtggccttggggtggctgtctagcctgggatggccctcctactctcctctgtgcttcagtggtagatcctgtggaggcactgggccagggtccttggggacccatcatggaagccatgtctgctgatccatatgtctagaaggggaggcatctgtccatccccactcctgaagtcaagggaccccttggtcttgcagggtgaccttgggccaaggccagccacctctgagctccatcttctgctttgtgaggtagaggtaagagcctttggcattgacaacacagatagagactcggttgggtcagggtggcattggctggcatactcttgggtgtagtgtcaactaaggatgagttcctaggggcaaggctgaaggtggcatctaccatcccataccacgttctgctgcctaaggacgcctgaagacaactgtgagactggcagtgtacactgcttccaagctgaggacattgttagaatcccagatccttgaaacaatgagtttatcttgttaggacccaagatcccactcctaggtggagtcaaagccttgggagcggcaccttattggggctcagtgaggtcatgtgacatggaaaccatgtagtgttactatgtagcaagaagttagaaagccatgcaacaaacctgtaattccaactcctgaggcagaggcaggtggatctctgatttcaaaggtagctccagatacactgtgagaccttctcaaaacaagacaagcagactggagagatagctcagaggttaagagcactggctactcttctagaggtcctgagttcaattcccagcaaccagttggtggtcacaaccatctgtaatgggattcgataccctcttctggggtgtctgaggagaatgacagtgtagtcacatacgtaaaataaataaatctttaaaaaaagaaaagaaaaatgaaaagggaggggggtgatggagacatggctcagacagttttttgtttgttttggctttttggtgtcttttcttctttctttctttctttctttctttctctctctctctctctctctctctctctctctctctctctctctctctttctctatcttttctcttcttgtcttgtcttgtatctgtgtagcagccctggctaccctggaactcacctataggtcaggctagccttgaactcagagatcagcctgcctttgccttccaatgctgggttaaaggtgtgctccagcactgtccactctggaccacttgttcttgtattcacctagttctcacagggtggctcatgacagttccaggcgacctgacctcttagggcaccaggcacatgtgcgcatattcatacacacaggcaagacgttcacacacgatacatacaatacaagacgtatctttctaaaaattaaagaaaataaatgagaagcgagagggaaaggagggagagccactgtttggactggaccaccactggcagggaaatgccagaaggttcagacagcattcagggtttgtggctggtgggggcagggataaaggaggagttttctaaaggaacatgtggtctgtgcgtgtgtgtgtgtgtgtgtgtgtgtgtgtgtgtgtgtgtgtgttactaggggtagactccagggccttccaccatgctgggcaaacaatttacactgagctatattttcgaccccctctttattttatttttattttattttatatatagctctgactggcctagaactcattatgtaaactaaggtgacctcaaactcacccatactcaaatgagattcacctgcctctgcctcctgagtgctagagacagtcatgaagcaccacgcccaccttctctttaaaaaaaaaaaaaagcctattgcttttgtttttatttttgtctgtggagggtggtgcccacacccagtggtgccagtttggaatcagttctcctgccctattctacctagggatcgaacgcaggtgggtaggtttggcagcagctgcttttaccccacgagccatctcgctggcctgtagccctttgtgtgtctgtctgtctgtctgtctgtctgcatggagtggagtctcatgtagctcaggctggcctgcgagttatgatcttcctgaccctggtatccaagtgcggagactgcaggctcactctgccacgcccttttacacagttctgggatggactctgcatgtcaagtgagttatagccacggccctattttattttattatttttgagatcgggccccactcatcatggaggctaaggtcggcctcctgagtggtgggatgacaggcgtgggtcgatgtgcctggctcctactctattcttttactttcacacatacccactacaggaagcgagtagcgagcccccttttaccagcaccccgccatgtgacattccgcagaaccagcgccatctgtgtgtttattcaatggttttggttgtatttaaagcaaattccccacactggtgcttcttacccggaaacgcctccatctgtagctacaaaaccaggccattccttacataacggcagcgttgcctaactggaaccgatctttaagacccaatccaggcccacgggagagttctgctaggccttagaacatctttgtgggtggttcgtttgaagtttgatggcttccttcctcccctgctcccctttctccttgccattttgggcactagagtttaaagaaacccgcctgccactgaactaaatccccagatttttttttttttaagttttttttcgagacagggtttctctgtgtagccctggctgtcctggaactcactctgtagaccaggctggcctcgaactcagaaatccacctgcctctgcctcccgagtgctgggattaatgtcttatgtatcccagactggtcttgaacttgtggtcatgcctggagtatcctattttgattgtttatgtgtatacccctaatatggatgtcagagattcatatcatatgtgccgtctttggtcatcctccatacttttgggggatgtatgggggcagggatggagtctagcctgggctgtggtaacacacgcttttcattccagcattaaagcagagataggtcgatctctgagttctaggacagcctgggctacacagggaaattctgtctcaaaaaaaaaaaaaaacaaaaagaaagaaagaaaggaaaagaaataagagtctccctatatagccctggctgtcctagaacttattatgtagaccacgctggtcttggactcacaacagagatccatctgcctctgcctcctgaatgtccactctctgcttggagacaagaatcgctcagtggcccggattcagggattcagctaagctggctggtccctgagctccaggcctccatctgtcttggcttccctgtgacaggattatcggctcatgccaccgcgcctggctcttacaccattcctagcgatctgaatttaatactctatggtcaagccatccttcaatgctccctcccctcctgttgagacagagtcttactcactcggtagcctggggtcccagaactcacagttagtctcccgtttgtttcctgagtggtgagatcgttcctggctagccttggctgctgatttggtagcctggtcccgcccactgcttaggattatcactgaggagtttaagccacacttcaggaagccctgtggatcctggaatctgagtgagacaagggtcacacagtggcctgaccggctctggtctctctctgcaggaatggacctgtcagccaatcaggatgaagagaccgatcaggagaccttccagctggagatcgaccgcgacacaagaaagtgtgcctttcgcacccacacgggcaagtactggacactgacggcgaccggaggtgtgcaatccactgcgtccaccaagtgagtgacaccctacaccccttcatcacctggcctggctcttcccccaggactgggcagcctgctcgatgcccccacgttgccagcccctcttctcttccccaggaacgccagctgctactttgacatcgagtggtgtgaccgccggatcactctgagagcctccaacggcaagtttgtgaccgccaagaaaaatggccagctggccgcctcggtggagacagcaggtagtcacttgggggcacgtaccctaagcctgtttccctagtaccccgtggtcaaccatcagtcccacctggacctctctgtgtgttcagggaatccctgtaagctggtgtaccctcaggccagcagcctgtgacccttagcttcttggtatccctctctgctgagccattccctgactggcccatctttgttgctgtgaagctcactggctccctttccctgtggcaggggactcggaactcttcctcatgaagctgattaaccgccccatcatcgtgttccggggggaacacgggttcattggctgccgcaaggtcacgggcactctggatgccaaccgttccagttacgatgtcttccagttggaattcaatgacggcgcctacaacatcaaaggtgggttcactgggtgaggatgcacctggccattcaaagccgacattagggaacgggtgtcctatgaccgcctggggtagcccctccccccttgtcttagaactttcctggcccaacctgggcagacagcgaaggtgggaagcagctagggagagtggtcgtggctccaatctgggaatcggagacaggagaattatcttttttttttttttggtgttgaggacagaacccagggctttgagcttattaggcaagcattctactgctgagttaaatccccaaccccaagaatcatctcaaaaagaaagaaagaaaagggaaaaagaaggtggagcctggtggtggtggtggcggcggcggcggcacacgcctttagtcccagcactcaagaggcagaggcaggtgggtctctgagttcttgccagcctgctctacagaatacattctaagacagccagagctatgcagagaaaccctgtctcaaaaacaaacaaaaaaagggggtggggagagaagatagaagataaggatattccttcttagctagctgtgggaccaaaaccagtgagaggacacagcaatccagaggtgtcagtcagaatcagagccctgtgctgtgtgtggccttagcaaggcaaacgggactcctttcttacagtgctgaggactggactcagagctaagatccagcccctccctgggggattctaggcaggggctctaccactgagccacgcccccagcccctcactgggggattctaggcaggtgttctaccactgagccacgcccccagcccctcactgggggattctaggcaggggctctaccactgagccacacccccagcccctcactgggggattctaggcaggggctctgctgctgatatatgtcctttttgtttgtttacttgtttgtttgtttgtcttattgtggccctagctgtcctagaacttgctttgtagaccagagatatacctgtctctgcctcccaaatgttggatttaaaggcatgtgccaccatgccccaccctagcctagccctcttatgttttgtagtttgagatggcatgtcagtagatttcccaggatggccttgaatctaggtaatcctcctgcctcagtttcttgagtatttgaattatgggactgtaccttacatccagctgagcccactcagttctggaagctgacagcgggagggagtgttaatcctttggggactgacaaggtggggttaacatgtagtctccctcctcagactccacgggcaagtactggacggtgggtagtgattcctcggtcaccagcagcagcgacacccctgtggatttcttccttgagttctgtgactacaataaggtggctctcaaggtgggcggccgctacctgaagggggaccacgctggggtcctgaaggcctgcgcggagactatcgaccccgcctcactctgggagtactagggccacctgccctctgcaggccgctctcgtcagtccctcctgttatccttactcatcgggtggccctgcagcaggtggcaaaccccttgcctttcaaactggaaacccaagagaaaacggtgcccttgctgtcaccctctgtggaccccttttccctaactcactgctccccatgggtcggtggctgcagactgtccccaggagggactctggttccctctgtccccttctttccatggggaactctggcacctttcttctgacctcagtcaactctgagccttatttccccccaggaagtggcctaggagaagctacagggcctagggacttaccctgagcttgtaactggaagaccccgtccctatccccgctcccgcccccaccccaccccacccctgctctggccccagcctctggaggccagccttttggcgggactgaagccgggcatggccaaccttgcccacaagtgtttttctggatcttggctggaaggcagtctgtcccatcctgcagtgtttgggcctggctctttgactcaaagctagctaggtggcactccgtgtcgctcctgcacattctggaaggggcgggcctctcacccacctcattccttttccccctggcctgactggaagcagaaaaatgaccaaatcagtattttttttttttttctttaaggaaatgttactgttgaaaggccctaggcaagcctgccctgttggttgtagtcgtgagtggtcttggggggagatgcttggctcctgtccctgcctccccagcgggttccctccctccctcctgcctgaccaccccagctctggctctgtgattggtgctccacgtcttcccagacacctcggggctcctgggcgggagaaagccggatgtgcccctccctgggagccctggagtaaacctcagggggccctttcccaatcacccccttccaccgacccctcaacaccatgcatctcactctgggtgtctcgctcctttatttttttgtaactgtcatttctataactctgaagacccatgatagtaagctttgaactggaaaataaagtaaaatcaagtctgcggcccgtgtgtgtctcaggggaagtggatgctggagtgggcagagggccggctgggagggaggcagcgctgattgattggcagcccgcagactcttgtttcggtctcggaccctagcggcttcagcatatgccttagtaactctggactgagaaatggctgacacgaggttcccgagccttacaagctgggcaggctagagggttcagcaggtaaagttgtgtgctgtcaagcttgatcagactgagtccccagcaccgtgtgaaaagttgggcacaacggtgtacacccaccccagggcctctggcaagcacagagacaagaggatccttggagcctgctggcggcccaaccttgcccaatctgtgattcccattgagtgagccataaggtggagatgggttttggaagataccccacataggcctgcggccccccacacccggaaataaaaacaagccaggcttgtcatcccagttattcggggagctgaggcaggaggatcacagatttaagactgcccaggttgaagagtaagttcaagggcagcctggacatcttgctagattgtttttttgttggttggttggtttttgttttgttctttttttcgagacagggtttctctgtgtagccctggctgtcctggaactcactctgttgaccaggctggcctcgaactcagaaatccgcctgcctttgcctcccgagtgctaggattaaaggtgtgcgccaccatgccaggcttagatgttttaaatgaagggctgtggagtgtggttcacgggtagcctcgctcagacaggctggggcaggagaaatggatggctcagcattggctgctgccttagggtttccattgctgtgaacagacaccatgacctggcagctcttctgaaggacattggactggggctggcttacaggttcatcaaggcaggaagcaaagcacaggcatggtgcaggaggggctcaagtctacgacccgggtctcaaagcccacccccacagtgacagactttctccaacaaggccacacccactccatcaaggccacacctcctagtagtgccactccttgagccaagcttattcaaaccaccaatcacaactgcttttctagaggacccaggttcaattcccagcatccacatgacagcttacaattgtaactacaattccaggggatccaacacccttacacaggcacacttacaggaaaagcaccaatcagtgcacataaaaatacataaatcgttagagagaagagaccattagctaccttcacccttaacaggcaagctgaggtcctgggagtgtgttagaggtccgcagcttggagtctatagggtagtggcatcgtctatacgttccttccttgacaggtaggtacttagctgagacctctggggtatcccagagacccattttacagagggaggcactgaggcggagggaaaagacaaccttgtttgctggctcagaagagtgccagtggggtacccacccacaaggctcagcatcccgaggcactgtggaggcagttacaaagccgcattgattggctgctgatgacgaaatgaagagccccgcggtgtgattggcggtcccagagggaaggcatgtggggagattgacaggggcagatggccacaaagggtccagtgacttcccgcagggtggaagctctgggcccaagccagtaaagtgtcaatgacatggagagacagatgaatccttcccagttgaattctcaggctctggtggggccgcgctggggagaaaagacaccctgtccgttacaaccaccaagcgcagccaggctacgtgatgactgggggaagtcccagacgtgacttcctgcagcactggaggggagggtccgacggaggaggctgagagtctgttggaggcagccgaggatcggagggaagaggcacaggtcttacatgggaggcataaagtctggtgggagtccaagggaggacggatgtagggtgatgggaagaaaggacctaatccagaaaaaggaacagaagagccacctacctggttaggggacgctggccctccgcagggaaagctgtcaaagaaaggcctggctaatgagaccatgtcgtggggggcccaggcaactgtggaggcatcagacaccttggggcaaggagggcacccatgagctagtacacaccactaagtatctcagagtcctgcacacacactcattgacacaggtgggtgagcagcacccacgggcagctgaagctgagtatcctgcccgcccctttgtttcttccaactgagcagggacaagaaggatccctatgaatatggctttttttgtttgtttgtttggttggttgggtttttgacttggtttggtttttccagacagggagtaaagacatacaccaccataacccagctttgtaaatctggtttttgtgtgtgaacctatgaattccactcctgttgcactgatgggaaattgaggcaaagtctcaaagaagctgacagcacaggctagtgtgttcattttctctctacaaaaagaggaaaaattggggctggtgagatggctcagcggttaagagcattgactgctcttccaaagcaggtcccgagttcaaatcccagcaaccacatggtggctcacaaccatctataatgagatctgagaccctcttctggggtatctgaagacagctacagtgtacttagatataataaataaataaatctttaaaaaaaggaaaaattatttattattttattattaaattaattgttgtatttatttattttattaatctatatttaatttatttttttattttgtgtgcatgagtgttttgcctgcatgtgtgtgcactacctgtgtgtccactgcctatggaggtcagaagaaggcgttgggtccgggaactggggttgtatggttgttagccgccgcgttcatgctggttctctgcgaggcggcacttagtcctgagccatcttctgtcagctcctctactttcttttagacagggtctcctgtagctcaggctgggcttcagcttgcctggtggttaagggtgactaagttaaatcatcttacatttctgcctcacttccacctcctgagtgctgggcttgcaggcatgtgccactgggatgggttttgtttcctgctggcttctcaccccgtagctccgtgtgttgggtcagggccagccctgtgcccactgagccattaaccctactgagcccactgtagggaaaaaccatagaggagcttctatgaccctcatgggtccctccaggtctgtcagagttcaggaggcatggatctctctggcagggagctgttgactttagccttggaatttcccaaccaagtctacactgagcaccctgtcgacgacctgcttctgactcctcctgtgaggctcttttggagtgatcttagtccccacagggcccccatcttctccagagctgagtggcctctcctactggacagagaagagctgtcctgacttggttaaaatgttgaatgcaaggagcggaggaaacggcccagctggtgaagtgtttggctcgatccccagagctgtggagttcccaacaggatggggctcactggctgccctgatcagcaagctcagaaaccaagatggatagctcctaaggactggaattggaggatgacccctggtgacagacacacttgcatatgcatctgtctgcacacatacacatatgcatgtaaaaccctgatccacgtggtagtgcctgactgtaatcccagtacttgggagacaggaacagagaatcaccttcagtttgaggccaacctcgtctacatatccagcaccttaggagactctgtttccaactcttcagggtggctcacatctctaatctcaaccctcaagaagccaagactggaagatgcctagagaggaaggtttgcttgggttcagtgccagcctccagaggcagaggcaagcagatttctgagttcgaggccagcctctacagagtgagttccaggacagccaggcagccagggctatacagagcaaccctgtctcaaacaacaacaataacaacaacaacacaacaagaaaacttgagtgtgcgtgtgcgtgtgcgtgtgcgtgtgtgtgtgtgtgtgtgtgtgtgtgtgtttactatttacagtaaacgagtctttggggaggcagccaaagtaggcgaggaactccttgtcccctgctgggctctctgggttgagatcttgtcttgatggggagataggaagggattctctgtccctcagggtgctatcagcagtgggaacagatggggtcgggagagagactgggggaggggagaatcagggtggaggagggctgtgatttaggtttaccatgaaaccggagtcatcaccggtgggagaggctggtcagagttcctcttttttcctcttctttccctaggacccaggcctgatccggtggggaggggaatgattggaaaatgctgccttctagagtccctagcgagagccacaccccaggcctcagccatcaatgacaacctttctgttctcactgaaagcaattaaagatctgtaagatgagtcagtgttacccattgtaagctgctgactgccttggtcccatccctgggacccacatggtggaaggaaagaatggactgatgcccttggacccccacgtgtgtgctgtggcacacacacacacgcatgcacacaaaaataagtaatgtagttcaaaatttagaataaatcaggcgtggtggtgcacacctttaatcccagtactcgggaggcagaagcaagtagatctctgtgagtttgagaccagcctggtctacagagtgagtttcaagccagccatagatagctacatagccagatcttgtgttagcctcctccttctaccaacagaaattaagatcacaaataaacaggaaagagggtggaagagacaactcagtggctatgaacatttgctgttcttgcagagaaaccaggattgagtcccggcacccacatagtgggtaaacattatctctagctcaaattccagaggacctggcttctgagagcacggtacacatggggtgttctctctctctctctctctctcacacacacacacacacacacacacacacacacacacacacgcaggaaaaacagaaaagcacataaaataaaaacaaatatataaaaatagaatccaaggggattcaacgatgtcatgagtccacagaaatcctatcctcccctttttcggggtgttacacgggcggatcaaacccagggnnnnnnnnnnnnnnnnnnnnnnnnnnnnnnnnnnnnnnnnnnnnnnnnnnnnnnnnnnnnnnnnnnnnnnnnnnnnnnnnnnnnnnnnnnnnnnnnnnnnnnnnnnnnnnnnnnnnnnnnnnnnnnnnnnnnnnnnnnnnnnnnnnnnnnnnnnnnnnnnnnnnnnnnnnnnnnnnnnnnnnnnnnnnnnnnnnnnnnnnnnnnnnnnnnnnnnnnnnnnnnnnnnnnnnnnnnnnnnnnnnnnnnnnnnnnnnnnnnnnnnnnnnnnnnnnnnnnnnnnnnnnnnnnnnnnnnnnnnnnnnnnnnnnnnnnnnnnnnnnnnnnnnnnnnnnnnnnnnnnnnnnnnnnnnnnnnnnnnnnnnnnnnnnnnnnnnnnnnnnnnnnnnnnnnnnnnnnnnnnnnnnnnnnnnnnnnnnnnnnnnnnnnnnnnnnnnnnnnnnnnnnnnnnnnnnnnnnnnnnnnnnnnnnnnnnnnnnnnnnnnnnnnnnnnnnnnnnnnnnnnnnnnnnnnnnnnnnnnnnnnnnnnnnnnnnnnnnnnnnnnnnnnnnnnnnnnnnnnnnnnnnnnnnnnnnnnnnnnnnnnnnnnnnnnnnnnnnnnnnnnnnnnnnnnnnnnnnnnnnnnnnnnnnnnnnnnnnnnnnnnnnnnnnnnnnnnnnnnnnnnnnnnnnnnnnnnnnnnnnnnnnnnnnnnnnnnnnnnnnnnnnnnnnnnnnnnnnnnnnnnnnnnnnnnnnnnnnnnnnnnnnnnnnnnnnnnnnnnnnnnnnnnnnnnnnnnnnnnnnnnnnnnnnnnnnnnnnnnnnnnnnnnnnnnnnnnnnnnnnnnnnnnnnnnnnnnnnnnnnnnnnnnnnnnnnnnnnnnnnnnnnnnnnnnnnnnnnnnnnnnnnnnnnnnnnnnnnnnnnnnnnnnnnnnnnnnnnnnnnnnnnnnnnnnnnnnnnnnnnnnnnnnnnnnnnnnnnnnnnnnnnnnnnnnnnnnnnnnnnnnnnnnnnnnnnnnnnnnnnnnnnnnnnnnnnnnnnnnnnnnnnnnnnnnnnnnnnnnnnnnnnnnnnnnnnnnnnnnnnnnnnnnnnnnnnnnnnnnnnnnnnnnnnnnnnnnnnnnnnnnnnnnnnnnnnnnnnnnnnnnnnnnnnnnnnnnnnnnnnnnnnnnnnnnnnnnnnnnnnnnnnnnnnnnnnnnnnnnnnnnnnnnnnnnnnnnnnnnnnnnnnnnnnnnnnnnnnnnnnnnnnnnnnnnnnnnnnnnnnnnnnnnnnnnnnnnnnnnnnnnnnnnnnnnnnnnnnnnnnnnnnnnnnnnnnnnnnnnnnnnnnnnnnnnnnnnnnnnnnnnnnnnnnnnnnnnnnnnnnnnnnnnnnnnnnnnnnnnnnnnnnnnnnnnnnnnnnnnnnnnnnnnnnnnnnnnnnnnnnnnnnnnnnnnnnnnnnnnnnnnnnnnnnnnnnnnnnnnnnnnnnnnnnnnnnnnnnnnnnnnnnnnnnnnnnnnnnnnnnnnnnnnnnnnnnnnnnnnnnnnnnnnnnnnnnnnnnnnnnnnnnnnnnnnnnnnnnnnnnnnnnnnnnnnnnnnnnnnnnnnnnnnnnnnnnnnnnnnnnnnnnnnnnnnnnnnnnnnnnnnnnnnnnnnnnnnnnnnnnnnnnnnnnnnnnnnnnnnnnnnnnnnnnnnnnnnnnnnnnnnnnnnnnnnnnnnnnnnnnnnnnnnnnnnnnnnnnnnnnnnnnnnnnnnnnnnnnnnnnnnnnnnnnnnnnnnnnnnnnnnnnnnnnnnnnnnnnnnnnnnnnnnnnnnnnnnnnnnnnnnnnnnnnnnnnnnnnnnnnnnnnnnnnnnnnnnnnnnnnnnnnnnnnnnnnnnnnnnnnnnnnnnnnnnnnnnnnnnnnnnnnnnnnnnnnnnnnnnnnnnnnnnnnnnnnnnnnnnnnnnnnnnnnnnnnnnnnnnnnnnnnnnnnnnnnnnnnnnnnnnnnnnnnnnnnnnnnnnnnnnnnnnnnnnnnnnnnnnnnnnnnnnnnnnnnnnnnnnnnnnnnnnnnnnnnnnnnnnnnnnnnnnnnnnnnnnnnnnnnnnnnnnnnnnnnnnnnnnnnnnnnnnnnnnnnnnnnnnnnnnnnnnnnnnnnnnnnnnnnnnnnnnnnnnnnnnnnnnnnnnnnnnnnnnnnnnnnnnnnnnnnnnnnnnnnnnnnnnnnnnnnnnnnnnnnnnnnnnnnnnnnnnnnnnnnnnnnnnnnnnnnnnnnnnnnnnnnnnnnnnnnnnnnnnnnnnnnnnnnnnnnnnnnnnnnnnnnnnnnnnnnnnnnnnnnnnnnnnnnnnnnnnnnnnnnnnnnnnnnnnnnnnnnnnnnnnnnnnnnnnnnnnnnnnnnnnnnnnnnnnnnnnnnnnnnnnnnnnnnnnnnnnnnnnnnnnnnnnnnnnnnnnnnnnnnnnnnnnnnnnnnnnnnnnnnnnnnnnnnnnnnnnnnnnnnnnnnnnnnnnnnnnnnnnnnnnnnnnnnnnnnnnnnnnnnnnnnnnntgactgctcttccaaggtcttgagttcaatcccagcaaccacatggtggctcacaaccatccgtaatgagatctgacgccctcttctggtgtgtccgaagacagctacagtgtacttacatataataaataaataaatcttaaaaaaaaaagaaagaaagaaagaaagaaagagagagagaaagaaagaaagaggtgagggctgggtgtggtggcgcacacctttaatcccagcacttgggaggcagaggcaggtggatctctgtgagtctgaggccagcttggtctacagagtgagttccaggacagccagggctacacagagaaaccctgtcttgaaagaaagaaagaaagaaagaaagaaagaaagaaagaaagaaagaaagaaagaaagaaagaaagaaagaaaggaaggaaggaaggaaggaagaggtgaataggataaaatgaggtccaataggttgggggcatggctcagtgttagagggcttgcctagcaagtgagaggcctgggttcaacctctggcactgaagagggatggtaggtaggtaggtaggtaggtaggtaggtatctagatagatagatgataaataggtagatggatggtagatatatagataatagatgtgggatagatagatgatagagatatacatagatgatagattatagatagatagatagatagatagatagatagatagatagatagatagacagacaaatggtaggtatatagatgatagaaagatgagggataaatagatggtagataagtagatgatagtaggtagatgagagggagagagagagagagcgagagagagcgagaaaggatataataaggtcattaggctaatttgatccaaagacagattggggttcttataagacaagtgatcaagcaggccagatatggggggaactgatctgtaattctagcacctggggtgggagatggaggcaggaggaaggggaggtcgagggtatccgcagatacttagtgagtttgaggctatccccagccacgtgagactctggcaaatccttccgcactaacaacaaaaattctgaaaggcaaacctcccttaactcataaagcatgaattggggcgtatgcgggccttcagagccatgtggtgtgtttgggaacagacgacaggaaacactgttgagaggactcagacccagagaggaagggacagcagagtcaccatgtggacaggcgttggggcttgctgggccgctcacaggaagcagcgcacaccagagccatccgcctaggagctgggccacagtttcctgcagagtgggccctgacacacccggccaaagcaagcactggcctgtggacagaaagcagacacaggacggagcccgttccggggtcagctcactgtacttgaagatgtgagcccaaagaagtggggggtgccacggcgtcttttgcagatgttactatgccagttggtgttagacacttagatatatttttaagaagagcagtcggtactcttaactactgaaccatctctccagccccacaatgacattcttcaaagagcagagcttagaggcacaggcacttgtcaccaagcagcaacatgagtcagatccctgaaaatccacaggcagaaggagagagctgactcctgtccgttgaccttcatgtgaatacagtggtgtgtggtggtgtgtgtgtgtgtgtgtgtgtgtgtgtgtgtgtgtgtgcatttatgccatgtgtgtcaagagtgtgaggaggacccaagagagttcctagacttaaagctggttnnnnnnnnnnnnnnnnnnnnnnnnnnnnnnnnnnnnnnnnnnnnnnnnnnnnnnnnnnnnnnnnnnnnnnnnnnnnnnnnnnnnnnnnnnnnnnnnnnnnnnnnnnnnnnnnnnnnnnnnnnnnnnnnnnnnnnnnnnnnnnnnnnnnnnnnnnnnnnnnnnnnnnnnnnnnnnnnnnnnnnnnnnnnnnnnnnnnnnnnnnnnnnnnnnnnnnnnnnnnnnnnnnnnnnnnnnnnnnnnnnnnnnnnnnnnnnnnnnnnnnnnnnnnnnnnnnnnnnnnnnnnnnnnnnnnnnnnnnnnnnnnnnnnnnnnnnnnnnnnnnnnnnnnnnnnnnnnnnnnnnnnnnnnnnnnnnnnnnnnnnnnnnnnnnn

SEQ ID NO: 2 - DNA, 2634 bp, Mus musculus
gagctaagccgtgttgaacaaaggaggtcgggcacagctatccaagctcccggggccaccgggccgccctccgccaccatgaccgccaacggcacggcagaggctgtgcagattcagttcgggctcatcagctgcggcaacaagtacctgacagccgaggcgttcgggttcaaggtgaacgcatccgctagtagcttgaaaaagaagcagatctggacgctggagcaacctcccgatgaggcgggcagcgcggccgtgtgtctgcgcacgcacctgggtcgctacctggccgccgacaaggacggcaacgtgacctgcgagcgcgaggtgcccgacggcgactgccgctttctcgtcgtggcgcacgacgacggccgctggtcgctgcagtccgaggctcaccggcgctactttggcggcaccgaggaccgcctgtcctgcttcgcgcagagcgtgtcgccggccgagaagtggagcgtgcacatcgccatgcacccgcaggttaacatctacagcgttacccgcaagcgctacgcgcatctgagcgcgcggccggccgacgagatcgcggtagaccgcgacgtgccttggggcgtcgactcgctcatcaccttggccttccaggaccaacgctacagtgtgcagacgtccgaccaccgcttcctgcgccacgacgggcgccttgtggcacggccggagcccgccacgggcttcacgctggagttccgctccggcaaggtggcctttcgcgactgcgaaggtcgctacctggctccgtccgggcccagcggcaccctcaaggctggcaaggccaccaaggtgggcaaagatgagctcttcgccctggaacagagctgcgctgaggtggtgctgcaggcggccaacgaggggaacgtgtccacgcgccagggaatggacctgtcagccaatcaggatgaagagaccgatcaggagaccttccagctggagatcgaccgcgacacaagaaagtgtgcctttcgcacccacacgggcaagtactggacactgacggcgaccggaggtgtgcaatccactgcgtccaccaagaacgccagctgctactttgacatcgagtggtgtgaccgccggatcactctgagagcctccaacggcaagtttgtgaccgccaagaaaaatggccacgtggccgcctcggtggagacagcaggggactcggaactcttcctcatgaagctgattaaccgccccatcattgcgttccggggggaacacgggttcattgcgtgccgcaaggtcacgggcactctggatgccaaccgttccagttacgatgtcttccagttggaattcaatgacggcgcctacaacatcaaagactccacgggcaagtactggacggtgggtagtgattcctcggtcaccagcagcagcgacacccctgtggatttcttccttgagttctgtgactacaataaggtggctctcaaggtgggcggccgctacctgaagggggaccacgctggggtcctgaaggcctgcgcggagactatcgaccccgcctcactctgggagtactagggccacctgcctctgcagccgctctcgtcagtcctcctgttatccttactcatcgggtggcctgcagcaggtggcaaaccccttgcctttcaaactggaaacccaagagaaaacggtgcccttgctgtcaccctctgtggaccccttttccctaactcactgctccccatgggtcggtggctgcagactgtccccaggaggactctggttccctctgtccccttctttccatggggaactctggcacctttcttctgacctcagtcaactctgagccttatttccccccaggaagtggcctaggagaagctacagggcctagggacttaccctgagcttgtaactggaagaccccgtccctatccccgctcccgcccccaccccaccccacccctgctctggccccagcctctggaggccagccttttggcgggactgaagccgggcatggccaaccttgcccacaagtgtttttctggatcttggctggaaggcagtctgtcccatcctgcagtgtttgggcctggctctttgactcaaagctagctaggtggcactccgtgtcgctcctgcacattctggaaggggcgggcctctcacccacctcattccttttccccctggcctgactggaagcagaaaaatgaccaaatcagtattttttttttttctttaaggaaatgttactgttgaaaggccctaggcaagcctgccctgttggttgtagtcgtgagtggtcttggggggagatgcttggctcctgtccctgcctccccagcggttccctccctccctcctgcctgaccaccccagctctggctctgtgattggtgctccacgtctccagacacctcggggctcctgggcggagaaagccgatgtgcccctccctgggagccctgagtaaacctcagggggccctttcccaatcacccctccaccgacccctcaacaccatgcatctcactctgggtgtactcgctcacatttatttttttgtaactgtcatttctataactctgaagacccatgatagtaagctttgaactggaaaataaagtaaaatcaagtctg

SEQ ID NO: 3 - DNA, 1482 bp, Mus musculus
atgaccgccaacggcacggcagaggctgtgcagattcagttcgggctcatcagctgcggcaacaagtacctgacagccgaggcgttcgggttcaaggtgaacgcatccgctagtagcttgaaaaagaagcagatctggacgctggagcaacctcccgatgaggcgggcagcgcggccgtgtgtctgcgcacgcacctgggtcgctacctggccgccgacaaggacggcaacgtgacctgcgagcgcgaggtgcccgacggcgactgccgctttctcgtcgtggcgcacgacgacggccgctggtcgctgcagtccgaggctcaccggcgctactttggcggcaccgaggaccgcctgtcctgcttcgcgcagagcgtgtcgccggccgagaagtggagcgtgcacatcgccatgcacccgcaggttaacatctacagcgttacccgcaagcgctacgcgcatctgagcgcgcggccggccgacgagatcgcggtagaccgcgacgtgccttggggcgtcgactcgctcatcaccttggccttccaggaccaacgctacagtgtgcagacgtccgaccaccgcttcctgcgccacgacgggcgccttgtggcacggccggagcccgccacgggcttcacgctggagttccgctccggcaaggtggcctttcgcgactgcgaaggtcgctacctggctccgtccgggcccagcggcaccctcaaggctggcaaggccaccaaggtgggcaaagatgagctcttcgccctggaacagagctgcgctgaggtggtgctgcaggcggccaacgaggggaacgtgtccacgcgccagggaatggacctgtcagccaatcaggatgaagagaccgatcaggagaccttccagctggagatcgaccgcgacacaagaaagtgtgcctttcgcacccacacgggcaagtactggacactgacggcgaccggaggtgtgcaatccactgcgtccaccaagaacgccagctgctactttgacatcgagtggtgtgaccgccggatcactctgagagcctccaacggcaagtttgtgaccgccaagaaaaatggccacgtggccgcctcggtggagacagcaggggactcggaactcttcctcatgaagctgattaaccgccccatcattgcgttccggggggaacacgggttcattgcgtgccgcaaggtcacgggcactctggatgccaaccgttccagttacgatgtcttccagttggaattcaatgacggcgcctacaacatcaaagactccacgggcaagtactggacggtgggtagtgattcctcggtcaccagcagcagcgacacccctgtggatttcttccttgagttctgtgactacaataaggtggctctcaaggtgggcggccgctacctgaagggggaccacgctggggtcctgaaggcctgcgcggagactatcgaccccgcctcactctgggagtactag

SEQ ID NO: 4 - DNA, 32767 bp, Homo sapiens
ttgcatttgaagctaccatgactgcaagagggagttcccgaaggggtctgggaatggcccagggaaataggggtgaggtgagactccactgccccgacagtgcccatgtatgaattagaaaaagtgggccaggcgtggtggctcacacctgtaatcccagcattttgggaggctgagtgggcagatcatgaggtcaggagttcgaaaccagcctggccaacatggtgaaaccccatctctactaaaaatacaaaaattagctgggcttggtggcacacatctgtagtcccagctactcaggaggctgaggcagaagaatcgcttgaacctgggaggtggaggttgcagtgagccgaggtcatgccactgcactccagcctgggtgacagagtgagactttgtctcaaaaaaaaaaaaaaaaaaaaaaagaaaagaaagaaagaaaaagaaaaaaagtgggccaggtgtggtggctcatacctgtaatcccagcactttgggaggctgaggtgggaggattgcttacagccaggagtttgagaccaggttggacaacatggtgagaccttgtctttacaaaaaaatacaaaaacctatctgggcatggtgttgcattcctttagtcccagctacttaggaggttgaggtggaaggatcacttgagttaagggaggagaccacccctcatattgtcttatgcccaatttctgcctccaaagaaagaaaaagtaaaaactaaaaggcagaaatgaaaaccacaggcagacagcccagcgccacaccctgggcctcgtagttaaagatcgacccctgatctaatcggtgatgttatctatagactacagacattgtatagaaatgcactgtgaaaatccctatctggttttgttctgatctaattaccggtgcatgcagcccccagtcacgtaccccctgcttgctcaatcacgaccctctcacgtgcacccccttagagttgtgagcccttaaaagggacaggaattgctcactcggggagcttggctcttgagacaggagtcttgctgatgcccctggccaaataaaccccttccttctttaactcggtgtctgagttttgtctgcggctcatcctgctacagagtctaggaggcagaggttgcagtaagccaaattcacgccactgcactccagcctgggtgacagagcaagaccccaccaaaaaaagaaaagaggccaggcgcagtggctcacgcccagctaatttttgtacttttagtagagacggggtttcaccatgttggccaggctgatctcaaactcctgtcctcaggtgatccgcccaccttggcctcccaaagtgctgcgataacaggagtggaggctcaactttttaaagaagaaaaggacgaatcaggacaggagacaattacaagctctgttcattcggaattctcattggcttacagaaataactttggctagtgattggttatatgttgtagacagacccacagggtggatggcgtctgtggccacttgggcattagctggtccagagcccagagtccatgtagcaagtagcttcaggacgtaattatttagctcaatagaaagtgagatgtgactgctgttacttttttttttttttgagacggagtttcactcttgttgcccaagctggagtgcaatggcgcgatctcggctcactgcaacctctgtctcccaggttcaagtgattctcctgcctcagcctcccgagtagctgggattacaggcgtgtgccaccaagcccggctaatttttgtatttttagtagagacagggtttcactatgttagccaggatggtctcgaactcctgaccttgtcatccaccggcctcggcctctcaaggtgctaggattacaggcatgagccaccacgcccggccttttaactgctgttacttttttttttttaatcatttttattctgctagttccataaaagcaatgtaaacaccagcattctatacatcttgctggtgaactcacataatgcttagttccctgatcctttgacctccttgtcttctccagttattttctgtttggaccactggccacaggaatggagtggggttggggcttaggagagagcaatgtggctttttggtatgacttgtttcattgactgctgttacattttaaatgcctttctgggcctgataatttaagggggctggcatttctcacatcaaagggcaaagggtttttttgtttgtttctcactattgctcaaaagccacatgtgtcaaggacagctcttgttaacgggcagagaagcttatagaacctttccagggctggcgcggttgttcatgtctgggggacaagagcgaaactccatctcaaaaagaaaaaaaaaaaaaagaacatttccaggccaggcacagtggctcacacctgtaagtcccagcactttgggagattgaggtgggaggatcacttgaggccaggagtttgagaccagcataggccacatggcaagaacccagtttctacaaaaacattttttttttaaattagctgggctcggtggtgcacacttgtggtcccagctactcgggaggctgaggtgggagaatcgcttgagcctgggaggcggaggttgcagtgagctgtgatcgcaccactgcatttcagcctgggcaacagagggagactctgtctcaaaaaaaatcaaataaagaaaaaagaacatttccattattgcagaatgttctattggacggcgctgggccagatgcctgccccaagccctgggacacccaaacctggtgaaagtgccaagctcccatctgggggtgctcacggaaggggccgggagctgggattacaagcgtggaggcaggcgccaccccagaggaggtgggtgatgtctgagccagagtctttgggatgagcagggctttggcaggcagctttgttgggcaggcaacaggcacagcaggtgcaatggcatcgaggttggagaggtggactggcggggagaagagaagggagggtggcaggagagatgggcagaggccccccaggagcccagagccttcagggctttgggccctcttggggcactggggagccacgggagaagtgtggggtggagaggggcgccctggatttgaccaccttcaggaacctaccttggctgcccgggtgggtgggatggaggtgatgaaggtggaggtcgtagcattgtcactgagagcgatgcttattctgatttttgcccccgtgagcctcagaaatcggtcagaacagtgctcgggctgggcgtggtggctcacgcctggaatcccagcactttgggaggccgaggcgggcggatcacctgaggtcaggagtttgagaccagcctggccaacatggcaaaaccccgtctctactaaaaacacaaaaattagctgggtgtagtggtgcatgcctgtaatccagctactccagaggctgaggcctccctgggaggcggagtgcagtgagccaagattgtaccaccgcccctccagcctgggtaacagagtgagactctgtctcaaaacaaacaaaaaagaacaaaccaaaaccagtgctccaattcaccttgctgaattggagaagaacaggtgcctgggtcctcccggctgacggtgacgtcactatgagccaccacgcctggcccggtgggtgtttacagcagaggtggttcagggaggagtgagtggcagatggtgcaggctcagggaggagtgagtggcaggtggggcctgaggccagaggcaggaggaccgttcaagactgaggtgtcttgggcactggtgccggggccggggagagccctggcatgccgggccccggccctcagtgaaagcaggatgaggtggcggccaagcagggaggccaaggcctggcagcagccggcagcccctctcctggcagggacatcttggcaggagccgggctctgcccagggcgctaatgtcctcttaattagccaggcacttgccaagcacttgccgctgcggcctcactttgcagaacgcacttgggtttggagcaggaccagcatcggccaccgggtgagtaggggggatggccaggtgagtaccatggccagaaggtgcggcctctgagtccccactgaagccaatccaggccccgacctctggtcatcatcaacagaagagtgacagaaacagaaaagatatcaaggaacacgttttcagggccagattccaggtcccccacctattttcctttgctcctgccttgcctggctctgcccccttgaactcttattcacccagtgtaggcatcacctcctcctgaaggccctcctggactgcacagttaactctggagcctcccctgcacagggcagctcatgtatggatccacaggtgagttcctgtctttgaagggttacagtttaggtcctggagcagtggtggggaggtcacacctccacccacatccctctttgcaaatcccatgggaactatgagcctgggtcccccaaactgcatgttccccacttaaagctgggccagatcctgtttgctgtatccaggcctcagtttccctgcttgtaaccagaagtccatgcagccagaaattgtcagggagctgggcacggtggctcatgcctgtaatcccagcactttcagaggctgaggcaggaggttcacttgtgatcaggagtttgggaccccagcctgggcaatacaatgagatccctgcctctaccaaaaaattaaaaacaattagccaggcctggaggcatacacttgtagtcctagctattcaagggaggctgaggtgggaggatcacttgagtccaggagtttgtggctggggtgagctctgattgtaccactgcactccagcctgggtaagagaatgagaccttgttttattttattttatttttatttattttgagatggagtctcactctgtcacccaggctggagtgcagtggtgcaatgtcggttcactgcaacctctgcttcccggcttcaagagattctcccgcctcagcctcccaagtagctgggattacaggcgtgtgccaccacgcctggctaattttttgtgtttttagtagagacagggtttcaccatgtttgccaggctggacttgaactcctgaccttaggtgatccatgcccccttggcctcctaaattgctgggattataggcatgagccaccgggcctggccgagaccctgttttaaaaaaattaatcaggtccagtgcggtggctcacgcctgtaatcccagcactttgggaggccgaggagggcagatcacctgagatcgggagttcgagaccagcctgaccaacatgcagaaaccccgtctctactaaaaatacaaaattagcagggcgtggtggcgcacacctgtaatcccagctacttgggaggctgaggcaggagaatcacttggacctgggaagcagagcttgtggtgagccgagattgcaccattccactccagcctgggcaaaaagagtgaaactccatctcaaataataataataataataataataataataataataataattggtagagatgttggtagaggcaggacagtgggagtgacagcctggtcctgtcctcccgggctctggctgaccatgctgtagtgtggctcagggccctggagggcacagctgtcctgtggccctgtggtcagccgggaagccaggcctggcaggactcctgccctagaatcagctcctcccactccccagggtcccatgcagggcgctggccgtaccaggcctcctcgcgggtgccacagagccagcggctgcacagcaacagagacgccattcacaggctctcggccacgaggccgctcatttacagagggctgagccgctgacatctgtgcgtttgtaacatggacagcatttctggtcccatacagacgcctgggccagccacatttatctccccttgagagaagggaaacgaggctcgggagggaatgagggattggcttggggtcacacaactttaatgatgaccctgggcaggaagctcccaggatggcaacagagactcagggcaggctgggcatggtggctcacacttgtcatcccagccctttgggaggcagaggtgcaaggatcactcgagcccaggagctcaaggccagcctggggaatatagtgagaacccatctctaaaaaaaaaaaaaataggccggtcgcggtgactcacgcctgtaatcccagcactttgggaggctgaggcgggtggatcacgaggtcaggagattgagaccatcctggctaacacggtgaaaccccgtctctactaaaaatacaaaaaataggccgggcgtggtggctcatgcctgtaatcccagcactttgggaggctgaggccggcggatcacgaggtcaggagttcgagatcagcctgacaaacatgacgaaaccctgtctctactaaaaatacaaaaattagccgggcgtggtgacacgcgcctgtagtcccagctactcaggaggctgaggcaggagaatcgcttgaaccatcgaggtggaggttgcggtgagccgagatcgcactactgcactccagtctgggagacagagtgagactccgtctcaaaaaaaaaaaaaaaaattagccgggcgtggtggcgggcgcctgtagtcccagctactcgggaggctgaggtaggagaatggcgtgaacccgggaggcggagcttgcagtgagccgagatcgcgccactgcactaaagcctgggcaacagagcgagactctatctcaaaaaaaaaaaaaaaaatttagccgggcatggtggtgcatgtctgtacccccagcaatttgggaagctgaggtgggaggattgcttaagcccaggagtttgaggcgggagtgagctgtgatggcaccactgcactccagcctgggtgacagagtgagaccccgtctctccctatcccccgcaaaaaaaaaaaaacaactcagggctttcccacccctgtccttgcacagatgaagaaccgaagcttctagaaggggtatattttgcccccaggccccaaatcctggtctttggactacagtcaagacctagcacagggctcaggcctaaaaaaaagctgttgaggagggtgtgaggctgcaacgttgcggtgagaagggggtccccagggagggcgcagcaggaagccccagggaagtgcctgggagagggaggttgtgcagccagaaggagcagcccgcagcctttggttgttgactcctgctttgtaagtggcagtctggttgggtaggacagggtccgagtcctcactcagggaactgagtccagggtgagctgagcagcccttcctggtggcctcactttcccctgcagagcctgctgcatggtgtccagtggccagcctgggaggagctcaggactggcctcacctcgtgccacgccctcgtaccaaggtggctcagatggcacctgggttcccgaagggcccaggaacacagcgtccatgtccccatccttccccggagggacttggggtggggcctgcaggaaggatcatgtgacttgttcaagggcagcttgtcctgccccggacacagaggtgcccatcgtaagcgagatgcaggcaaggtgaggacagggcatggtgccgagcaggaatgattttcgaaaatgctactctgtggtcgggcacggtggctcactcctgtaatcccagtactttgggaggcccaggcgggcagatcatgaggtcaggagttcaagaccagcctggccaacatggtgaaaccccttctctactgaaaatacaaaaaactacccgggcgtggtggtggatgcctgtaatcccagctactcaggaggctgaggcaggagaatcgcttgaaccctggaggtgaaggttgcaatgagccgagattgcaccactgcactccgacctgggcgacagagaaagactccgtctgaaaaacaaacaaacaaaaccccgagattctcttttcccccgtccggagctctatggccatctggagctcgttctgtccacaaggacacatttcctggcagcagctgtggaccagggctcactcactcacatctgtacccaatctagagcaggacaaacacctatcacctgcactggcaatggacagaggacagtggcagccccatcaccagaggcattcaagccaaggcattttctatcgtctatttatctatctatctatctatctatctatctatctatctatctatctagatgagatcttgctatgttgcccaggttgaactcctggcctcaagcgatcctcctgcttcagcctcccaaagtgttgggatttcaggtgtgaaccactgtacctggctggagtgcagtggcactgtcatagctcactgcagcctccacctcctgggctcaaggaatcctctttcctcagcctcctgagtagctgggaccacaggcatgcaccatcacacccagctaaaccttgattttttccatagtatatggctcagggcagagcaaagaagcacaaaaacatgttggcttgcggttgagggctgatgggagggggttctggccaaagcccaaaattaacagccacaacgtcagtgtctgtgggaggggttgccaggggcgtgcgggttctggggctcaaggccctgccggtaaacccatttgaagcaggatggcaagaaggtgacaccatcttcccccgcgcactgaaagcccctggctgggattgcctggggcagacacaggctcggaccagccccagcaatcccagtttatcagcgagccggctgagggcccggagttatctcagtgcccggcctgagaccttgtgggcagcctgtggtcatgctggcattccaggggccttttggcatgtggggaatgtccaggaaaagcctcagccttcggtgaggcgcagaaaagggaagtgtccctagagggggtgggtgagggcgtgggaggtggtgtctgcagggaatgtcccctttgggggaggaggatggagggttgggattctgaggatgggggggggggctgtagccagcaccatgtccctcctgtgtgaccagctcagagtcccatgaaattggggcttgggaggggaagggacactggcctgggaaccagagacctgggctggtctggctcacagttgctggacctctgtgatccgtgtcaaaaaacgagaacaccaattcctgtcctgcccactcaccaccaggtgggacctgaaccctggcatcgccagcattgggaatgtcggccactgactcaaccactctcccggagacctatttgggccacccgaggcgggtgcctgggccacacggaggggtcctggtggtcttcagggcagcggctgtggggctgaagcctcaaggaaccacatctctgcataggagggccaggctgcagggcctcggagacaacctagttgggcgtgttggggtctgtgggtcccaggtcctggcctcaccgggtccccaccgcgctgtcagctcccagcctctttccctcgtctgcctctgggcttctgtaaggctatgtgctccaaggccacctcctccaggcagccctcagacccccaccttcgcccagtaccgatctgcaccgtggtctctgaagtctccatcgtgacctcaaacctcgctcgtccttgctcctagcgaggcttggggtcggggtgtccgaggtgggggacatccgggggggttaggtggctggcgcggggagccggggttgtgaggggtgatgtcctcaggcggcggcgctgcggggtgcggcgaggacaccggtggggtgagagcaccggcggggcagcagcgggggccgcagcgccgggtccctcggcccggggcccctcccgcgcggagccaggggcgggacaggggggcgtggcctggtggcgctgacgtcacctcgcctataaaatgtccggggcgccgctagctgggctttgtggagcgctgcggagggtgcgtgcgggccgcggcagccgaacaaaggagcaggggcgccgccgcagggacccgccacccacctcccggggccgcgcagcggcctctcgtctactgccaccatgaccgccaacggcacagccgaggcggtgcagatccagttcggcctcatcaactgcggcaacaagtacctgacggccgaggcgttcgggttcaaggtgaacgcgtccgccagcagcctgaagaagaagcagatctggacgctggagcagccccctgacgaggcgggcagcgcggccgtgtgcctgcgcagccacctgggccgctacctggcggcggacaaggacggcaacgtgacctgcgagcgcgaggtgcccggtcccgactgccgtttcctcatcgtggcgcacgacgacggtcgctggtcgctgcagtccgaggcgcaccggcgctacttcggcggcaccgaggaccgcctgtcctgcttcgcgcagacggtgtcccccgccgagaagtggagcgtgcacatcgccatgcaccctcaggtcaacatctacagcgtcacccgtaagcgctacgcgcacctgagcgcgcggccggccgacgagatcgccgtggaccgcgacgtgccctggggcgtcgactcgctcatcaccctcgccttccaggaccagcgctacagcgtgcagaccgccgaccaccgcttcctgcgccacgacgggcgcctggtggcgcgccccgagccggccactggctacacgctggagttccgctccggcaaggtggccttccgcgactgcgagggccgttacctggcgccgtcggggcccagcggcacgctcaaggcgggcaaggccaccaaggtgggcaaggacgagctctttgctctggagcagagctgcgcccaggtcgtgctgcaggcggccaacgagaggaacgtgtccacgcgccagggtgagtggggacgctgcccccgcctctcctggtccgtgcacaaagcgcaccccacccgcgcccctccagcctcccgccctttctcgctcgcggcgccgctgcggtccggagcactgcccattgcgcccccgctaggcacgcgggctaccccgcctggagggggcgaggagtggggctttgcccatcctcgggtgccgctgcccacctcccaccccgggctgggatcatgggctcccctaggccccgcggagtcgcaaccgtacgtgcaccctcctaacccccccccccgcccaatcttggctctccccacgcgcgctgatccctcggatcagctgtcccagctcttgcggagtgggagcccctcacccatttcctcgtgcccctccccccgccggctgtcctggagctcgggggtccgaggcaagggtcgccacccgcaagggcgcgcctccacccccaccggcagcctttcgcgggcgagatgggggaggttagccaggcctttgatcccggcggggcgcgcctccacctccccgtctgcccggccttcctccacctcctcccgctgccgggcggggtcggcctccgctggtgggggggggcgcggggtgtcagcccttccccccagcccctcctcccgcgtctgccccgcgctcgaggccgcggcctttgtgagcaggggggcgggtcgcctcgactgggtcctccctcgccccctttgtcctgctccatctctgcagatgggaaaaccagatgcggcggggcgggggaggggatcggcttttgcggttcacccctgcagaggagccccccgcgccgcccccgggcccagggctcgggtcccgaggttccccaggaggcggtctccctcctcgcgccgcggcccgggaacggcgtggcgcggatggcggccctccaggcaccccgcccttcgcccgccgcgcgcgtctccaggccggtgcgctgagctccgctccgcgggcgaccgagggcggcttcagcgcgagccgggagaccccaggccagctccctcgggaagcccctaccctctggtgaacccatcccctagggcgctcgccgggaacaattgactgcaactcgatccgtcccctccggggcctcctgcaggcacggctatttgcgaccggcctgtgcgccactctttcccttctttctcagattctccccgaggggctttctcttccttttggcgtcctcttccactcctggcggagaagctgttccttgcttgcagacagaggccccgctggagggaggggcgtggggggatctttttccctggataggaagtcggaccccaggccttggagatggctggacgggagcccagtttgtgtcctcatccctcctcttggaaggagccctcctgacggcccccctcttggctgtgggctctgcaggagggggaaagaccccccatggcagtgggggtgagggtggaggcctgggtggggtaatggccattttgtgcctgaagtttgctaccttaagtcccagagaggtgaagctgcttgtcatgggtcacacagcaagtgaccacaaggaagcagcatgcagaagtgggtgcatttggctccagaaaccccgtttcctgtttcccacagcgcatggcgggcagagctcctcacctgatcagcaggcattgagccctactaaggggacctgctgagccatgagtgaaccagtggggttcacgttctcttggggacattacgaagtgtcaaggaaaaggcagcgggtacaggttattagatggctgagtcctttctgagcaggacatttgagctggcctgaaggatgaatagaaggtggcaggtatggggggggtgctgtgtggaccagcgttgtaggctgtgggtgtctcctgtgcaaaggtcttatggcaggaaggtacagagaaagcccagtgtggctgggaggaagcttgtgaggtctgggccacgggaccttgggtgagagcttagtgcagggctatggtccttgccttggggttgcagccacagcctcccgtggggaagaagtcgcagaagtaggtggccttggccctgggggccaggaagttgcagagagcctgagggtgtttttggcgagcctgggcagataactcccctctcctgagaagcttgctgggggcgtctggtgtgtgattcaggctgatagggtgggaggaaccagaaattgcagccaggagaggtggtggtgatggctcagcttggagttgaaagggatgtgggacggcgcgggggtgggggtacttgggggccgaggttggggctcctctggcctcagatcttggggtccttatctcgtttctatgtcagccaactcccggggggcttttgggaactggagtctgcaggggtgggcgtggggggcgtgtctgcagaggccattttggacgggcctgcgtggcaagggggaggcgtctgcttccgacacacatgctggggaacgccagccaggaaggggaggatccggacttagctggcaggggggatgtgaatcatctctgcaggcctgcacgggcgggcccggtgggggcagggtgctcccctttgaaaaacgctgcgccctgctcttcagcctcagtttccccatctgtaaagtgtgcattccaggcctccttgggctggcccagagctgccctgggcaggggctttcagcccttcacaccagaggctgggtcagctgagtgagtgctcctttgtcctcccgccatgccccaggctcctccctgctccccaggatccacacctaccctggccccgaccctgggccatgcctcaccacacttcctgtcttctctcacatctctcacatctgggagtcctctcccgccagcctgtgcttgcatctggggatccatgccagggataggacctgtcctccctgctggcttgggacatgccctctcccagccactctgaggagggctgactgaggaagggctcgtcaagctgggctttgcaggatgtgtaagagttctccccacgaggcgcagggcattctgagcccagggaatggcttgtataaggatgcagaggcatttgaaatggccaagtagttgcaggaatcgactggaaaccggggtggtaaggtgaagccatagaacattccaggccccctcccctaaatgagatggaaggagtgcctgttttgaacaagccaggggcatctggggaccgttaaggcctgggggtggtgatggggactggagggtgtgaggcaaccagggggtgcccctctgagccaccacagacagaatggttcagaaggccaggcacactggctctcgcctgtaatccaagcactttgggaggccaaggagggaagatggcttcggccaaggagggaagatggcttcagcccaggagttcaaggccagcctggaaaacatggcaaaacctctgtctacaaaaaatacaaaaaattagccaggcatggtgatgcacgcctgtcgtcccagctactcaggaggcttagatgggaggatcacttgagccggggagtttgaggctgcagtgagccgagatcgtgccactgcactccagcctgggcaacagaacgagaccctgtcttaaaaaaattttttttggcctggtgcggtggctcacgcctgtaatgccagcactttgggagtccaaggtgggtggatcacctggaggtcgggagtttgagaccagtctgaccaacatggagaaaccccatctctactaaaaacacaaaaattagccgggcgtggtggcgcatgcctgtaatcccagctactctggaggctgaggcaggagaatcccttgaacccgggaggcggaagttgcagtgagccgagatcgcaccattgcactccagcctgggcaacaagagtgaaactccatctcaaaaaacaaaacaaaacaaaaaaaacaaccaaaacaaacaaacaaaaaactgtaattaaaataattaaaagaaaaaagttaaaaaaaaaaaaaagagaggatggctcaaaggctggaaacagggaaggccactgtgaggggaggacaggcagggctagacctctctggaaggaggagggagaggtacccgtgggcccggcacaggagactcttaatctcctggctcccgggggcttctgtgggcctgtgactcaggatttctgtgcctctgttgatgaaaagaaaaatcctgaagaaaacactgttcccatagtaacacagctctaattagagactccaaggccaagcgagggccttggagccaggaggggccctgctctactggggggacgacacccctttcccctatccctccctgctggggtgtggcctgatgtctacgtggcaccaggcccctaaatcctttcaacatcctggcggagcggagaggctgggcccttttgacaggtggggaaactgaggaaggttgcagggaaggcactcatccaagggtgcctggccccccgcggtgggtgcctcactggctggcctaaacctttgcatcaaaccagttccaggattgaacgcaacaggctgatggggactgagtcgtggtacagatggcggcagttgtgtggccctgggcccaggaatggctgggaagctccctttcttctctggcttgggggatgaggttagtgtaaatttcatggagttgccaggaggattaaggccgacgtgcattcacacgtggccccgtggctgccgccagttaagccctgcgcagccattggaagtctcattgagaaggagcctcccggcttcctgcatttgttccaggcgggctggtaagcgccctgcttatttgcaaggctgtgtgaggacgagccctgtaaaccctaggacgaggctgtgctaatgtggtttctgttccactgtctccccttctccttttgcccctctttctggggaacctggagcccctgatgccctctgttttttcctgctgctggggtggacctagaacctctccctccatcctttctgctgctggggtgggcctgcaggaggctgtcctcttacctggtccctaacttccctccgatcagcggggcttcagcggagccccagcgcattggacaggtggtgctctgtggccggcacaggccagggcccagggtgcggcccctgcctgtaggtagacatgcaggcccttctgagcagaatgagggggcggtgagggcagctgtgcgggtgtggctggcctgacggctccctgcagccctgcggcttctgtgcagtgggggtggggcgggccagacctttgcagggcctcttggctggtggagggctgagtgagcagaggccccagccctcgtgttccctggggtgtggccttaggatggtcccggcaccctggggacccagcccctgctcaccttatcctcctcccgtgcttggctggggtgtggtggctgagccagcccacccagtgcggtggatgctcgtcggagggcagagggtgggctaccggcttaaggggccccagggaacctggggggtggagcccaaggggttccaagaaggggcggggccaggaacccatagacaagagggtggggcagggaaagggcgtggcaagagggccacccacctccggtccagagagccagccagacccttactttctcttgctgtgtgaccttaggcaaggacatgccaccaccggccttagtctccctctttgtgaagtaggatgaagatccccacctgtggagcagatgtggggctgcatggttgggtcaggatggaacaggatggggaggccgggcgtggtggcttacccctgtaatcccagcactttgggaggcaaaggtgggaggactgcttgagtcctggagtttgggcaacatagcgagaccacccccatctctacaaaataatgttaaagttagccaggtgtagtggtgagtgcctgtggtcccacctactggggagactgaggcaagaggatcctttgagcccaggaggtggaggctgtagagagccatgcttgggccacttgcactccagcctgggcaacagagcaagaccctatctctaaaaaaaaaatggaattgaggatgtgtcctctgggtgtgggctctaccacccaccagcctccctctcctgtgggtgctgcctgccacccaccgctgaggtccctgcagcatcaaggtgcccaaacgaagacactctccagctctgagccaggcacccatacagagcccggcagacgcctctgctgctgcagttcttagaatccagagcgcgtggggaatgtgaatttgtgctgctggagccaaacatcccacctccaggttttagctggaggaatccatgtggatatgcaaagcaatgtagttataatgaatagcaattgtgggctgggcgcagtggctcatacctgtaatcccagcactttgggaggctgaggtgggtggatcacctgaggtcaggagtttgagaccggcctggccaacataatgaaactccgtctctactaaaaatacaaaaaaattagccgggcatagtggcgggtgcctgtaatcccagctactcaggaggctgaggcaggagaatcacttgaacccaggaggcagaggtttcagtgaggcgagatcgtgccattgcactccagcccgggagacacagcgagactctctttctcaaaaaaagaatagcagctttgctatagcttaggggagcaaaacccgaaagccaccttaagtttcccgaagatagagatccctggggtcctattctgagacagagtcttgctctgtcgcccaggctggagtgcagtggcggatctcagctcactgcagcctccgcctcctgggttcaagcaattctcctgcgtcagcctcccgagcagctgggattacaggcgcccggcaccacccccagctaatttttttttttttgagacagagtctcgcattgtcgcccaggctggagtgcagtggcgcgatcttggctcactgcaagctccacctcccgggttcacgccattctcctgcctcagcctcccgagtagcagggactacaggcgcccgccaccgtgcccggctaattttttttttttgtattattaatagagacgggtttcaccgtgttaggatgatctcgatctcctgacctcgtgatccgcctgcctcggcctcccaaagtgctgggattacaggcatgagccaccttgcctggtccttttttttgtatttttagtagagatgaggtttcaccatgttggccaggctggtctcaaactcctgacctcatgatccgcccgcctcggcctcccaaagtgctgggattacaggtgtgggccactgtgcccggccagtcccattctactttttagggacatggaatcatgtaaagatgccatacagaaaacagtatgcaaatccagagacagaggacatctgtgcatgtttctttctttcttcctttttttttttttttttttttttgagatggattcttgctctgtcgcccaggctggagtgcagtggtgcaatctcagctcactgcaacctctgcctcccaggttcaagtgattctcctgcctcagacttccaagtagctgggattacaggcatgccccaccatgcccagctaatttttgtatttttagtagaggcggggtttcaccatgttggcaaggctggtcttgaactcatgacctcaggtgatccacccgcctcagcttcccaaagtgctgggattacaggcgtgagccgccgtggcaacccgcatgcttcttatgtataagaaaaaaacagctagaaagttgtgggttcactggctgggcacatggtggcttgtgtctgtaacctcagcactttgggaggctgagttaggaggatcatgtgaggccgggagttcaagaccatcctaggcaacatagccagaccctgtctgtaccaaatagaaaaaaaaattaacttgatgtggtggtgtgtgcctgtagtctcagctatttgggaggctgaggtgggaggatcacttgagcccaggaagtcgaggctacagtgagctatgattgtgccactgcactccaacctgggcaacagagcaagaccctgaatcaaaaagaaagagatgtatttgccaacacaggggtgttctgcagtggggtgggaaggggacgtgtaggacttcatagtttccttttttttgttttagagacagggtttaaaaaaaaattttttttttttttttgaggcggaatttcattcttgttgcccaggctggagtgatctcggctcactgccatctccgcctcccaggttgaagtgattctcctgcctcagcctcaggcaattttgtatttttagtagagacggggtgactccatgttggtcaggctggtctcaaactcccgacctcgggtgatctgcctgccttggcctcccaaactgctgggattacaggtgtgagccactgtgcctggccccttttttttttttttaagtagggtcttgctaagttgtccaggctggtcttgaactcctggtctcaaatgatcctcctgacttggcctcccaaaaggctgggattgcaggagatatgagccaccgcacccggcccttttataagttttctaaaggaaaggaacatgtaccatcgtgttttattttaatttttacatagaagcaggaacaatagcatgaacccccagacacggccccccaagatgcgctgttccgctgtgctgcagccccatttgtccttttctataccatttttggttgtatttgaagcaaatccctgacatcagggcatttcatcccaaaatacttccatctgtgtttctaaaaaaacgaggccattttcttatgtaaccacaacgtgatcaacagtaatcaatgcttaacatctaattctgggccacgttaagaccctcctgattggctcaagaatgtcttttgtgcagttggtttcttgattctttttgttttttttgagacagggtctcactgtgtcacccaggctggagtgcagtggtgcaatcacggctcactgcagcctcagcctcctgcctcagcgatcctcctgcctcagcctcccaagtagctgggaccacaggtttgcaccaccactcccagctaattaaaaaaagtaatttgtagagacgggggtggggtgggggtcttgctatgttgcccaggctggtctcaaactcctagactcaaacaatcctcctgccttggcctcccaaagtgttgcgatcacaggcatgagcccctgtccctggcccctattatttctctaactggggaaagtcatgtgggaacagatgtagcttgccttggcctctgaccggccctgcctgcgttcctgggtgctctctgctgcttctcatgtgtgccactgtggggactcggccgcccaccccaccccgtggtgttaccttgcgtgtgtagttctgtgagctcagggctatggtctgccagaactagggggcgtggggccccagtaccagcccaaggcctcctctctgcaggtatggacctgtctgccaatcaggacgaggagaccgaccaggagaccttccagctggagatcgaccgcgacaccaaaaagtgtgccttccgtacccacacgggcaagtactggacgctgacggccaccgggggcgtgcagtccaccgcctccagcaagtgagtgcctcgctcccacctgtcaccgcccccaccaccttgcctgggctaccccgcctgaccctgtcccgccatcccccaggaatgccagctgctactttgacatcgagtggcgtgaccggcgcatcacactgagggcgtccaatggcaagtttgtgacctccaagaagaatgggcagctggccgcctcggtggagacagcaggtaacactaaagccccagttccctggagccgtcctggagtcctggagggtctggccatgccgtggtcacttggtagccccagccaaggcctgctctgtgctgggcatccccccggactggccccgcactgtcctaccctggggctgactgctgtgtgaccccagctcctggccctccctctctggtcaccccagcctccaccccactccctgccaggaggctcactgactcccctctttctgggacaggggactcagagctcttcctcatgaagctcatcaaccgccccatcatcgtgttccgcggggagcatggcttcatcggctgccgcaaggtcacgggcaccctggacgccaaccgctccagctatgacgtcttccagctggagttcaacgatggcgcctacaacatcaaaggcaggttctcctgtgggcagctgctgggcagggaacccctcggtcggggctggggtcagtgctgcggggagcgccctctgcatccacactggaccctggcttggctcagggccattccaggccctaaagggacaggtgtctgatggccaccaggggctctgggatgcaagcagcccctttccctcttgtctgtgtggttggggggacttaccttgcccacctgacagagaggtgtgtggaggggagagcagggaggggaaggagagcagggaaggggagggaggagagcaggggaggggagagccgggaaggagaggagagcaggggtggggaggttctggaaagggtgtgcaggggaggacgcgcctcggttatgggactggagccccttcccaggaggacccccaacaatccagaggtgcctgttaggattcagaacatggtttttttgtttgtttttttgagactcactccctcaccctggctggactgcagtggcgttatctcggctcactgcaacctctgcctcctgggttcaagtgattctcctgcctcagcctcccaagtagctgggattacaggtgtgcaccaccacgcctggctaatttttatatttttaaaatttattatttatttattttgagacccagtctggagtgcagtggcgttatctcggctctctgcaacctctgcctcctgggttcaagcgattctcctgcctcagcctcccgagtagctgggactatgtgtgggagccaccatgcctggctaatttttttgtatttttcatagagacgggtttcaccatgttgtccaggctggtcttgaattcgtggcctcaagtgatccgcccacctcagcctcccacagtgctgggtttataggtgtgagccaccacacccggctaattgttttgtatttttagtagagacggagcttcactatgttggcaaggctggctcgaactcctgacctcaagtgatccgcccacctcagcctcccaaagtgctgggattacaggcgtgagccactgcggccgagcagaacacgttctaggacccttgttcatgtgtccatcatggacaggaggacgtgcgggccatagggaccctggctcattccggagccgggactggagggtggggcgtcacccttgggaacacccgtgcccaccctccgctgcccagggtaggggtggggagccaggctttgggccccacttgataaagtcccctccccagactccacaggcaaatactggacggtgggcagtgactccgcggtcaccagcagcggcgacactcctgtggacttcttcttcgagttctgcgactataacaaggtggccatcaaggtgggcgggcgctacctgaagggcgaccacgcaggcgtcctgaaggcctcggcggaaaccgtggaccccgcctcgctctgggagtactagggccggcccgtccttccccgcccctgcccacatggcggctcctgccaaccctccctgctaaccccttctccgccaggtgggctccagggcgggaggcaagcccccttgcctttcaaactggaaaccccagagaaaacggtgcccccacctgtcgcccctatggactccccactctcccctccgcccgggttccctactcccctcgggtcagcggctgcggcctggccctgggagggatttcagatgcccctgccctcttgtctgccacggggcgagtctggcacctctttcttctgacctcagacggctctgagccttatttctctggaagcggctaagggacggttgggggctgggagccctgggcgtgtagtgtaactggaatcttttgcctctcccagccacctcctcccagccccccaggagagctgggcacatgtcccaagcctgtcagtggccctccctggtgcactgtccccgaaacccctgcttgggaagggaagctgtcgggtgggctaggactgacccttgtggtgtttttttgggtggtggctggaaacagcccctctcccacgtggcagaggctcagcctggctcccttccctggagcggcagggcgtgacggccacagggtctgcccgctgcacgttctgccaaggtggtggtggcgggcgggtaggggtgtgggggccgtcttcctcctgtctctttcctttcaccctagcctgactggaagcagaaaatgaccaaatcagtattttttttaatgaaatattattgctggaggcgtcccaggcaagcctggctgtagtagcgagtgatctggcggggggcgtctcagcaccctccccagggggtgcatctcagccccctctttccgtccttcccgtccagccccagccctgggcctgggctgccgacacctgggccagagcccctgctgtgattggtgctccctgggcctcccgggtggatgaagccaggcgtcgccccctccgggagccctggggtgagccgccggggcccccctgctgccagcctcccccgtccccaacatgcatctcactctgggtgtcttggtcttttattttttgtaagtgtcatttgtataactctaaacgcccatgatagtagcttcaaactggaaatagcgaaataaaataactcagtctgcagccccaggccggcctgtgtgtgtcttggggctgaggtgggtgggggggctgaggtgggtgggagggctggcgggacaggtaggcgccctggctccccagctcagtgctgggagtgtgcagtgggagggaggccgtggctccagtgggtgctccggagctcgtgggcccagcacacctccttaagcgggggatggagcgctgggagggggtggactgtggcccatgcgacccccagagccattaggaggagttctgtggtgagaagtggctgtggctcctcgtaggctacgtccaccatgcgggggacctcgggggtgtctggcggtggcacgctggatgttgagaaggcgcagcccagggaacactcaaaccaggagaccccacattatcctctagttgacatgtgcccttcgactaggggacttggtggtaggggcagctccgcccccatactgcgaggatccgggccttccacttccccagacacagcaggttggggtgcccctggggctgggagatgctgccctgggcccctcagggggcggccgtggtaggatggaccgggccgagcgtgcagaccctgggcaggtccctacatcggaaccagcagccctggggatatctggcatatcagaggctgaggactgtttccagactttaccaaggccacagtcagggcgacctgggttctgagcctccctttgcatcctaggctgcagggacaggggctgggcagaggctcgcggacctcgtgcagcttcattcactcccaggtgcccctaaggatagcagctgcgagaagactgaggggaggagcagtaaggcgcagcctggagcggagggacctggcgtccagtcattgtgcgctgggaaggcggtgatggcgacggaatttgggacacgcggggcgtcccgggggcagccagggcactgcaggccggagccccctgttcccccgcatcctccccgccgtcggcagcagagcaagcgctgattggctgctgatgacgcaactgggagggctgcgctgtgataggtggtccctcgggggcgtggggcgcaagtcttgagattggcaggggcaggtggctgctgcagagggaagtcggggtcacctcagcgaggttccggcggccacccctctcccctcccccatgaaagccaggctggaagccagaaaaatcccagtgactggaagggacagattaatcctccggaaccaaactctttgagacctggggaggagggtgggaggcactgggaagggggattggggggagcctggctcatttccacccatggagctgacctagaatgaccctaaggtccccggagccaccagctgattccgaattccattcattctgcaaaatttggcgcctaccacgtggccgagattcccgaggctgcagccaatgagcagcatagtccgatgggggaggctggaagggccgttcacgagatctctcgggaggaatcggtaggagctgcccaactgaaagggacgggggaataacccggggcgagggacctgcccaggccctgccctctggggggaagccaggccaggggccgggggcatctctggggtcccaggtgagatgcgggtcgagggagccaggccacggttctccagactcgcgtggaggccacgagcgtcttctggaggagcgggcactgcgcggaccggcagactctggggcgctcgtgctccccatctcctgaccttttcctaccttcagttccctcctgtcaggacaggttctggggctcgccggggcagggagccagggcagagggtgcagtttccgctcctgcctgagtcaccttcgctttctcagcgattcttcattcacaagggcgtggcccatcacacgcactcacacacttgtgaacttgcacgcacacacacatatggacctgtgcaaagagccccatgcacaggcaggtacacgtgcatgtaggcgtgcacacagacacgcacagatgcaggcagaccaactcccaggaatctgtctccagcctacagggattcagcactcagggtaccagcctctgtcccgtgcacccccattcccggcagttctcccaggtgggtcgggggccactagggaccccataccccgagggtggctcctccattaagcctgccatggggttgggagtgagagtcccacctcccacttgagagtccccagtgagtcaaggcaagtgcagccagggctccaagatccttgttgggattcactgtgatccccaaagatcacgacttaagggaaaacattcaattaaacttgttagagcaaagaaaggagagactgggctgggagcagtggctaacgcctatatagttcagctactcaggaggcccaggtgtgaggattgcttgagtccaggaggctgaggctgcagtgagctatgatggcaccacccactgcactccagcctgggtgacaaagcaagaccctgtctcaaaaaaaaaaaaaaaaaaaaaaaaaaaggaaaaagaggccgggcacagtggctcacacctgtaatctactaaaaataagaaaattagccagacatggtggtgggtgcctgtaatctcagctacttgggaggctggggcaggagaatcgcttgaacccaggaggcggaggttgtgtgagccgagattacaccactgcactccagcctgggcgacagagtgagactctgtctccaaataataataataataataataaaataaaaagaaaaaagaaagaaagaaaggagagactgagctatattgcccagtccaggcatgtgggcagtctgggggacagtggggcatactcggtgtctcagggtcccagccctgggtgcccccactgctgtctgctgtgacctcctcaggaggcctcattgggagggaccctgagtcctgcggggggctgtggagctgtcaccagccccaggaggactcaggcaagtccctctggtggtcgaggcctctgagcttcccagtgtgtctccacgggacaccccccctccagaccttctgccccagctcagcctcttccaattcattatcagggggtgggggaggggacaggaagccccagacccagctgggccccatttcctccagggccacagtggcctctcccagagtcacgaggatgggggctgatctcactcttttttttttttgagacggactctcactctgtcgcttttttttttttttttttttttgagacggagtctcactctgtcgcccaggctggagcgcagtggcgtgatctcggctcactgcaatctccacctcccacgttcaagcgattctcctgcctcagcctcctgagtagctgggactacaggtacgtgccaccacacctaactaatttttgtattttttagtagagatggggcttcaccatattagcctcccaaagtgctgggattacaggcatgagccaccatgcccggccttgacttcactcttttaaaaaagtcaaatacttggtgcttgaaatcccagcactttgggaggctgaggcaggagaactgcttgagctcaggagtttgagaccagcctgggcaacatggtgagactcctgtctctgtaaaaactacgaaaattagtcaggcatggtggtgcgtgtctgtcgtcccagctgctcaggaggctgaggtgggaggatggtttgatcctggaaggttgagactgcagtgagctgtgattccaccactgcagtccagcctgggccgcagagcaagactctctctcaaaaataaataaaataaaataaaaagtctaaaacttttctttcaaacgacggcttttggggctcataaggtgcgtgaagatggaaagggggcccggcagtgcccatttcggctcccttgggaccccggcttccctgaagacccctgagcaatggttggctgggtgcctggtctccctgaacgggctgtgggcaacaaggttgtctggatgggggaggggctctgagacccttgggggcagcagagggagaagggaacagatggggtctcccaggcagagaggcctggaggggtggggcggggcagggcatttggcgtgaaacccaagccccttaacggggccctagcttaaaccgggaggaggggcctctgtgatgtgcaaataattaacacagaagccttcactgtgctcccctcctcatcccaggacccaggtctgaccctcaggaggggaggaggtgagcaaggggggaacccaccttccagggaacccccagatagtgccaggcaccaggcaagtgctctaaaaggctttactaatattatttgaagaaactaagctaataaataaatacggtataaaatcaaagggtacccacagatataaacaaaaatccacagctaacccggccccagccctctttcctttggaggtaactgtgttaatggttttttacacccctctggaattttttttttttttttttttttttttttttttttgggaaggagtctggctctgtcgcccatgcagcgcagtagcgtgatctcggctcactgcaacttccacatcccgggttaaaacgattctcctgcctcaaccgcctgagtagctgggactacaggggcgcaccaccatgcccggctaattttttttttttttttttttttttttgagctggagtcttgctctgtcgcccaggcgggagtgcagtggcgcaatctcggctcacttgcaagctctgcctcccgggttcacgccattctcctgcctcagcctcctgagtgggtgggactacaggctccagccaccacgcccggctaattttttgtatttattttttaatagagatggggtttcactgtgttcgccaggatggtctcgatctccctttttttttttttttttttagacggagtctcgctctgtcgcccaggctggagtgcagtggcatgatcgtgactcactgcaaactccacctcccgggttcacgccattctcccgcctcagcctcccgagtagctgggactacaggcgcccaccaccacacccggctatttttttgtatttttagtagagacaggggtttcaccatgttagccaggatggtctcgatctcctgaccttgtgatcctcctgcctcggcctcccgaagtgctgggattacaggcgtgagccaccgcgcccggcctcttgtttttttttttttttttttttatagacttctaaggaaagcaacactaagaaaatatatttttaagaaattattcagccaggcgtggtggctcacgcctgtaatcccaacactttgggaggctgaggcgggtggatcacttgaggccaggagtttgagaccagcctggctcacatggtgaaaccctgactctactaaaaatacaaaaaattagccgggcacagtggcatgctcctgcaatgccagctacttgggaggctgaggcaggagaatcccttgaactggggaggcagaggtttcagtgaaccaagatcgagccactgcactccagcgtgggtgacagactgaaactgtgtctcaaaaaaaaatttttgtttttggagatggggtcttgctctgtcacccaggctggagtacaatggggtgatctaggctcactgcaacctcaaactcctgggctcaggtgatcttcctgcctcagcccctggagtaactggcactacaggtgcatgtcagaacacctggctagtttttaacttttttgtgtgtagacagggtcttgatatgttgcccaggctggtctccatcaccttctgggctcagtgatcctcctgcttcagcctcccaaaatgctgggattacaggtgtgagccaccatgcccgaccctgagggataccttaatgtttatttctcacatttcttctagaacaaacattgccagcgcatcccagactctgaactgtggctggggactgcagcatggaggtctttgcaggcactctgggaaacatgccacaagcagggtattaacccaagacagtcagtccctccaatgagaaaaaggagccgagggactgtgcatgcctcagagccagatgcagcagaactggtgggttgagggggcactgagcgcctggtgcctcctgctgccccccaccagctccgacagtcctcgtccttgtcctccccatcagaagggaagagtgaattgtctgtgggatgtgccagtgtccccggttctgaggttgggcaggctggggagccccagacatggcttgctgcccactgtggagcctcctggacttagttccaggctctgcccgatcctctgagggtgtggcttcaaagccctgcttgggcctaaggccatcccagggcagtgactgagggtagactgagatgtcccttgggcaccagtcctagggtacctgggctgggggtcttcagctcaggccccctagtgcccgtcctttgggctgtgggcaggtttccacagcactggccctttctgaccttacacccctgtgcatcctcactggggctctgtgaaggtgaaagtcacactaaggactgtgcctatggtggccagggcaccccaccggcagcacacctcagaggcctcatcctaggcgctgctcacttttttttcttttttttcctttttttttttttttttttttccgagacagagtcttgctctgtcacctaggctggagtgcagtggcatgatctcggctcactgcgacctcctcctcctcctgggtttaagcaattctcttgcctcagcctcctgagtagctggcattacaggtgcccgccaccacgcccggctatttttgtagttttagtagagacggggtttcaccatgttggccaggctggtctcaaactcctgaccttgtgctctgcccgccttggcctcccaaactgctgggattacaggcgtgagccactgtgcgtggccctgctcattttcttaccacagctttccagaaataaagttaggatggaaagagagagagagagattgagagagagagagagcaccacattcagatagagacaggagagttctcagcaagaagagaactcagctcagagttgagaatgtctcaactcagctgtctccctgctgagacgtcctgggctgaagtgtcccctcacccctgcggggctgtgactgcacactgcacacatgggtcacagcagggcttggcgtttggagcaggccgggttggtggcttgtcctcatctcttgcctggagctgtgctggcctgtggtttgctttggctgctaccatgtggagggagaggtgcttgtgtccatgcctggcctcttggaaggccaccactgtgatggagagaggaaggccaccactgtgatggagagaagccggggccagaccgatgagggctgagagcccatgggcaggggttgtggtctcggccaaaccccagctggcagctgatggcagccaccccggggtcctcagatatggcacagctgcctggctgagcctcggcaaagggaagccttgtggaaaatagcaactcagggatgttgtgagtagtgggctgagctgtggtttattttttagagacagggtcttgctctgtcacccaggctagagtccagtggtgtaatcatagctcactgcagccttgaccccccaggctcaagtgatccttgtgtcttggcctcctgagtagctaggactataggtgcataccaccatgcctcgcttgttttttgttttgatagagatgggggtcttgctaggttgcccaggctggtctgtaactcctgggctcaagtgatcctcctgctttggcctcccaaagtgctgggattacaggcgtgagccactgtgctggccttggggtgtggttttatgtggccatagatgactgagatgggtgagaagcgggacctaggggaatatacagggcagggggatccgacagggggacaggagggcagacagctcctggaaggcctgggaaagagatatcagggctggaccctggagaagtgaggctttgagggaggggaggagatggggcctggcggggtacgggcgctgctcctaggtctgagggcatcggcggtctgagagcttgcgggagggagggctgcctcccggtgctcggtgccctggctctcctccttgctgctggctggcctcctcctcctcatgcatctgtgtgtcctggaacacagggcactgtccctctgcctgtccagaaaagcacgtgctccttggggcctggcctgctcagccctatgtcccacccgctccctgctgctattcccaggccttcgggcctcactgcctggggtggccgtgctcagccccaccctgtggtgccatggcctccccacccctgccccgaactgcccctgggaccagttccttcagctcccaggacagggcctggccatccctgtggattctccctgttcgtggacccccattggtgcccagtctccttggactgtcttctgagcctctctcagatgtacccccaactgtaccctttcacccagaggccatttggcagcgtcctccaggactcctgccgtgggggaagtctccaccaaggccaacgcgtgactgcatcccgaggagctgatttaagatctggttctcaggaacacctggaactggccagtcagcatccccggccctgcggtctgcacttggacaagggtcaggcaatgaggatgagcagcaggcggggcttctcctggaagccttcccagcctcctgggccactccagtgggtcccctccacagactcagcctgttccctgccacctggtgccggtttctctgtggcacctactaggggccgagtgccccgggactgcccagctgagcagcgccgtccaggtctgcacccagctacactcagggcacgtgcacaggtgagcagccgggcacgcaggcacctgccaggtgtgggtgtggactaggtgctcccgg

SEQ ID NO: 5 - DNA, 2767 bp, Homo sapiens
gcggagggtgcgtgcgggccgcggcagccgaacaaaggagcaggggcgccgccgcagggacccgccacccacctcccggggccgcgcagcggcctctcgtctactgccaccatgaccgccaacggcacagccgaggcggtgcagatccagttcggcctcatcaactgcggcaacaagtacctgacggccgaggcgttcgggttcaaggtgaacgcgtccgccagcagcctgaagaagaagcagatctggacgctggagcagccccctgacgaggcgggcagcgcggccgtgtgcctgcgcagccacctgggccgctacctggcggcggacaaggacggcaacgtgacctgcgagcgcgaggtgcccggtcccgactgccgtttcctcatcgtggcgcacgacgacggtcgctggtcgctgcagtccgaggcgcaccggcgctacttcggcggcaccgaggaccgcctgtcctgcttcgcgcagacggtgtcccccgccgagaagtggagcgtgcacatcgccatgcaccctcaggtcaacatctacagtgtcacccgtaagcgctacgcgcacctgagcgcgcggccggccgacgagatcgccgtggaccgcgacgtgccctggggcgtcgactcgctcatcaccctcgccttccaggaccagcgctacagcgtgcagaccgccgaccaccgcttcctgcgccacgacgggcgcctggtggcgcgccccgagccggccactggctacacgctggagttccgctccggcaaggtggccttccgcgactgcgagggccgttacctggcgccgtcggggcccagcggcacgctcaaggcgggcaaggccaccaaggtgggcaaggacgagctctttgctctggagcagagctgcgcccaggtcgtgctgcaggcggccaacgagaggaacgtgtccacgcgccagggtatggacctgtctgccaatcaggacgaggagaccgaccaggagaccttccagctggagatcgaccgcgacaccaaaaagtgtgccttccgtacccacacgggcaagtactggacgctgacggccaccgggggcgtgcagtccaccgcctccagcaagaatgccagctgctactttgacatcgagtggcgtgaccggcgcatcacactgagggcgtccaatggcaagtttgtgacctccaagaagaatgggcagctggccgcctcggtggagacagcaggggactcagagctcttcctcatgaagctcatcaaccgccccatcatcgtgttccgcggggagcatggcttcatcggctgccgcaaggtcacgggcaccctggacgccaaccgctccagctatgacgtcttccagctggagttcaacgatggcgcctacaacatcaaagactccacaggcaaatactggacggtgggcagtgactccgcggtcaccagcagcggcgacactcctgtggacttcttcttcgagttctgcgactataacaaggtggccatcaaggtgggcgggcgctacctgaagggcgaccacgcaggcgtcctgaaggcctcggcggaaaccgtggaccccgcctcgctctgggagtactagggccggcccgtccttccccgcccctgcccacatggcggctcctgccaaccctccctgctaaccccttctccgccaggtgggctccagggcgggaggcaagcccccttgcctttcaaactggaaaccccagagaaaacggtgcccccacctgtcgcccctatggactccccactctcccctccgcccgggttccctactcccctcgggtcagcggctgcggcctggccctgggagggatttcagatgcccctgccctcttgtctgccacggggcgagtctggcacctctttcttctgacctcagacggctctgagccttatttctctggaagcggctaagggacggttgggggctgggagccctgggcgtgtagtgtaactggaatcttttgcctctcccagccacctcctcccagccccccaggagagctgggcacatgtcccaagcctgtcagtggccctccctggtgcactgtccccgaaacccctgcttgggaagggaagctgtcgggagggctaggactgacccttgtggtgtttttttgggtggtggctggaaacagcccctctcccacgtgggagaggctcagcctggctcccttccctggagcggcagggcgtgacggccacagggtctgcccgctgcacgttctgccaaggtggtggtggcgggcgggtaggggtgtgggggccgtcttcctcctgtctctttcctttcaccctagcctgactggaagcagaaaatgaccaaatcagtattttttttaatgaaatattattgctggaggcgtcccaggcaagcctggctgtagtagcgagtgatctggcggggggcgtctcagcaccctccccagggggtgcatctcagccccctctttccgtccttcccgtccagccccagccctgggcctgggctgccgacacctgggccagagcccctgctgtgattggtgctccctgggcctcccgggtggatgaagccaggcgtcgccccctccgggagccctggggtgagccgccggggcccccctgctgccagcctcccccgtccccaacatgcatctcactctgggtgtcttggtcttttattttttgtaagtgtcatttgtataactctaaacgcccatgatagtagcttcaaactggaaatagcgaaataaaataactcagtctgc

SEQ ID NO: 6 - DNA, 1482 bp, Homo sapiens
atgaccgccaacggcacagccgaggcggtgcagatccagttcggcctcatcaactgcggcaacaagtacctgacggccgaggcgttcgggttcaaggtgaacgcgtccgccagcagcctgaagaagaagcagatctggacgctggagcagccccctgacgaggcgggcagcgcggccgtgtgcctgcgcagccacctgggccgctacctggcggcggacaaggacggcaacgtgacctgcgagcgcgaggtgcccggtcccgactgccgtttcctcatcgtggcgcacgacgacggtcgctggtcgctgcagtccgaggcgcaccggcgctacttcggcggcaccgaggaccgcctgtcctgcttcgcgcagacggtgtcccccgccgagaagtggagcgtgcacatcgccatgcaccctcaggtcaacatctacagtgtcacccgtaagcgctacgcgcacctgagcgcgcggccggccgacgagatcgccgtggaccgcgacgtgccctggggcgtcgactcgctcatcaccctcgccttccaggaccagcgctacagcgtgcagaccgccgaccaccgcttcctgcgccacgacgggcgcctggtggcgcgccccgagccggccactggctacacgctggagttccgctccggcaaggtggccttccgcgactgcgagggccgttacctggcgccgtcggggcccagcggcacgctcaaggcgggcaaggccaccaaggtgggcaaggacgagctctttgctctggagcagagctgcgcccaggtcgtgctgcaggcggccaacgagaggaacgtgtccacgcgccagggtatggacctgtctgccaatcaggacgaggagaccgaccaggagaccttccagctggagatcgaccgcgacaccaaaaagtgtgccttccgtacccacacgggcaagtactggacgctgacggccaccgggggcgtgcagtccaccgcctccagcaagaatgccagctgctactttgacatcgagtggcgtgaccggcgcatcacactgagggcgtccaatggcaagtttgtgacctccaagaagaatgggcagctggccgcctcggtggagacagcaggggactcagagctcttcctcatgaagctcatcaaccgccccatcatcgtgttccgcggggagcatggcttcatcggctgccgcaaggtcacgggcaccctggacgccaaccgctccagctatgacgtcttccagctggagttcaacgatggcgcctacaacatcaaagactccacaggcaaatactggacggtgggcagtgactccgcggtcaccagcagcggcgacactcctgtggacttcttcttcgagttctgcgactataacaaggtggccatcaaggtgggcgggcgctacctgaagggcgaccacgcaggcgtcctgaaggcctcggcggaaaccgtggaccccgcctcgctctgggagtactag

SEQ ID NO: 7 - DNA, 32069 bp, Mus musculus
  misc_feature (6372)..(6556): "n" at positions 6372 through 6556 can be any base.
  misc_feature (8664)..(8683): "n" at positions 8664 through 8683 can be any base.
  misc_feature (27710)..(28786): "n" at positions 27710 through 28786 can be any base.
gggctggaccttcacagagaggcagagctacacaaggcaataccaattctctggggcctgagggaggaaatgccccaaaccctgctggctccagttgaggtggtgtgcctctgggagacaatggggagaagtcttgcttcaagttatttcccccacagcctgatccatctatgctggcacccccctctagtagaccctacaagatgggtctactatgagccctactgttctagctgctcctatttaaagggctgcctgcctgagggtacagggtcaccccagctgcccatgtagggtcctacaaatgctcaccacatcaaccactcattctctcctcatctcaagaagcagggtgagagagtttggtaatctggccttttcatgtaaatttatgtaaataggatataaatatcacaacatatgtaaataggatataaataccacagaacctcagcatctcaggaggtcctgatatctagaatctaggaggtagaaggaatggcagaaaagtctggaggagatatgttcgccctgtgcccgttggccctgtgtttccatgtagaacccagggagctggagctggagctggaagccagcaaagtggtccccctgcccagttattcaggtgtcccaagaagtcctagagagaagagatctgtaggttctcaaggtaagggatgtcagggacctggcagagagggctctcgaggtagcctgtagaggctggatgtggctgcttgggtaagaatggctctcataggctcatatatttaaatgcttagttattaaggagtggtactatttaagaaggattaagaggtgtggccttgttagaggaggtgtgtcactgggggtgggctctgaagtttcaaaaacccaactctgtcttccctctgcatgcctttgtgtgtatctttctgtcttaggatcaggatgtagccggaaactacttctccagcagcatccctgcctctgtgacctcgtgctccccactatggtgattgtggactaaacctctgaaactgtaaacaatcccccagttaaatgattctctacaggagttgctgccttcgtgcccagcactcaggaggcagaggcaggtggatctctgtggggtcaaggccagcctggtctacagagtgagttctgggacagccagggatatacagaaaagcctgtctcaacaaacaaacaaacaaataggaaaggtagtcatggtcattgtgtcccctcccagcaatagaacactgactaagacactggggtgcaggtgctgagtgtggacaatgacgacgtgggaaccacctctgcaccaggctccaagtgggagagtgccaggatcctggggtgtaccaggtagattgcattgttcatgttttactgcagaggactgtgaggctcagaaaggaacaattgcttgtccccaatacagagccagaaaaggatgctaataggtgagaacaccaaattctgtttcctcctcttcctcttcttccttctcctcctcctcttcctcttcttccttcttctcctcctcttccttttgtcttgagcactgggcaggacacaggacatctgcctctggaattccagggctaccttggctccctaggcaagatggatcccaagggagagtctaccctctgactttactttttgcacagactagggctgggccctctcagctacttagggctgtaagtgccctcggaggagccagcattggaaggagtagtaagaatttggaggagcgggggctggagaggtggcccagtggttaagagcactggctgcttttccagaggtcctgagttcaattcccagcaaccacatggtggctcacagccatctgtattgagatctgacgccctcttctggtgtgtctgaagacagctagagtgtgctcatatacataaaataaataaatcttaaaaataataatttggagaagggctggctctgccccatgctggctcatggggcctcccttagggtactcagacctcagagtcagttgacacctggtcctttatctctgggcaggacatcagccacctgctctgccactaagaggctaaggaggcgtccacgggagtgaggaacttggaatcaggccagacgggggtggtggaagtttccaggcatgtaagcctctcctcgtagctctatagtgcgcacctcttccccaggtcccaggatctgagaggactgctcggtcccttacttgttccagaatctgggtggaggcttttgggaaacaacttgggggcctttctcaatccaccacccccccccctttcccaggtctcaagaacttttccagtctttcccattttttggacactccagggggtaagaaaaaaaagaggcaacaggcaaagcccggtggtgacttctctctaactccctagggggagccagagtccactgaagccaggcatacctgacaggacagctcctacagggccagaagtctgagaaggcttcatggaggaggtgttatttggaggaaagtaaaggctctgtgaacattctctaggtctgtgagtgcagagtactttgcgggtagaaataaaggcgagcaggaggaggtgggagagaggaaaggctaaggaaagtaagctgggggtcgtgggagagccaaacatgaacccagaatctttgcaaaggccacttcatagaggacattgcattactgacatggagggcaaaggggagccatggaagaattttaggcagaaaagggtctgggtcagacttagttttagaaagataagtcaagaggctggagagatggctcagcggttaagagcactggctactcttccagaggtcctgagttcaattcccagcaaccccacatggggcgactcacaaccatctgtaatgtgatccagtgccctcttctggtgtgtctgaagacagctacagtgtactcatatacataaaaaaataagagaaagataagtgaggcgtggaagtgcttgcctgtaaccctaacacttgggaggccgggggcagaggtattgaaattaggggcctggagtgggcccagggaggccctgtctcaataacaagcgacatggggttggagagtgactttatggttaaaagcaagcattgactgcggagcgcccccactggatagctcataactgcccctacctccagctgcagcagatctgacgtgcttgtctagagtcctcgagcatctgcgcactgatgcacacacattctctctgttagacacatgacacctatactcacacgtgcatacacacacacacacactctactctctccctctctcacctatttttaatctaaaaacataacaaaacaataacaggctgcaccctagaagagacactggatggggcaaggcagaaggtggagacagaggttaggaatggacaaggcagaagaccagaagaccgtgggaagtgacatccacagtattggacatatgtcatctgaaagatactggaagagcagcaagcaccacccccaccccaccccacccccctaagatttccctgcatagcgatggaacttgctctgtagaccaggctggcctccaactcccagagatcccatctcccgagtgctgggattggggagcttgccacaccactgggctgtcctaagagcagagctccagagctggaggacgacttggcttgggagagggagaaaaggccacgggaaaaggctaggaatccagctgaggcctctgggggcaacatctatgctctaaatatcttggtggttcttcttcttcttcttcttcttcttcttcttcttcttcttcttcttcttcttcttcttcttcttcttcttcttcttcttcttttccttcttttccttcttttccttcttttccttcttttccttcttctccttcttttccttcttctccttcttctccttcttctccttcttctccttctcctccttctcctccttctcctccttctccttcttctccttcttcttctccttcttctccttcttctccctcttctccttcttctccttctccttcttctctcctcctcctcctcctccttctgtaagtatatatatatatatatatatatatatataccatagctgtacagatgtttgtgagccttcgtgtggttgatgggagttggacctctgcttgctccagtcaaccctactcactcaggtcatcagctcatctctgctcacccagtccctgcttgctccagtccaaagatttatttattataatacataagtacactgtagctgtcttcagacgccagaagagggcatcagatctcactacgggtggttgtaagccaccatgtggttgctgggatttgaacttgaactcaggaccttcagaagagcagtcagtgctcttacccactgagccatttcgccagtccctaatacctgggttcttaacctgcaaattaaatgggtaactggcgacagtatatatatatatatattcattccaatcttccctggagcttacgagatttttgtcatgagttgagtgtcaacaaaagttaatgaagaaactggatttatcattcattattcataggctaaactcactcagaggagtcacatttgagccgtaagccccctccccacaatgcaaagagaagggaagggtccagccagccctcacacccatccagcccctcgctgcacttccctggcttcccctgccccaggccagtttggattggcagcaggtgcaggggtggatttcttccactcctgactgctacagagcagtggggagacaggagtctgcgttctggcatgggaatgaaaatttacaggagcttcctcggtagggtgaattccaagtgagagggctgggccagcccaaacccctaccatctcagtctcctcttcctcccaggtatctgggaaggtcctgtagagtctgaagacttcagcagtagctgcatctttgtttattatgctaccttctgcctcctcagggaggaggagcgctggaagagtacatgctgggtaaattctcagagggcgctgcaggtgagtggcctacagggggtcctggtgtaactttaattttttatttttttaaatcttatttttaatgatttcttttaatgttttaacccgtttttttgtaacccaccagaggtagtggaaaagaaagaaaacgggagaaatggacctatttagaaaggttttttggaacaacagatgtctgtgttatctggaaatcagcagttcagttcacaggttagcaggcatcgatggcttgatccactagcaaacacctcacagacacaccagcaggccagttcagtacagtcgggttagcaacggtggtgacacgacctagtagagacagccaggcctcagcctcagcttcagtcagcaagaacgacactgggagaagttctcaactgtgcctctctcaaggaaagccacgatcagcaaagactcaagacccacaagcggtgtgtagctagctctatacgcaaatctagctctgtctccatcactccgtggcgtcctatttataccctccaaacatcacgtgtcctccatatgccttgtcttgcctcagcacaggcatccaatcagccccagtccttagaagcaacaaacaaactgcagcacaccacaagagttttggtgtgtttctctttatggagttccgacaaaggcagttcaactacacagtataaggcagaccaatacatgcacgttgttagcaaaaaaatccttcatcacgtgacttttcacattcttgctttagcagaacatcctctctcctgtgtctgcttcagcgaaacgttccttcctgagtctgccttagttagcctttcacacctgtgtccactttaacaaactgttccttcacgtgtttgccgagcaaaacaccatccgaccgacctttcaaagaacccttaagtttccacttcacccggggattggggggggggcagtggcagaggaacaggaaggctggctattctctatattggcccaacattcatgaatgagctcagctaacttcttctcttctgtgggcctcagtttcctcatctgagaaatggcagtcttgagacagggtggggcccgaggaaaaggactcggttctggggaggaacagcttcagagtgcagagttactgtgtatttactgtgggtctctgggcacagcatcagttttgccttacacaaaattgatgggggtggtgcacgcagtgtaggagtggggggcacacagtgcaggggctgggggcacacagtgcaggggtgggggaatgcagtgcaggggtgggggaatgcagtgcagtgctggggggcatgcagtgcagtgctggggggcatgcagtgcaggggnnnnnnnnnnnnnnnnnnnnnnnnnnnnnnnnnnnnnnnnnnnnnnnnnnnnnnnnnnnnnnnnnnnnnnnnnnnnnnnnnnnnnnnnnnnnnnnnnnnnnnnnnnnnnnnnnnnnnnnnnnnnnnnnnnnnnnnnnnnnnnnnnnnnnnnnnnnnnnnnnnnnnnnnnnnnnnnnnnnnnnnnnggctggggggcacgcagtgcaggggtggggggaatgcagtgctgggggcatgcagtgcaggggtggggctgttatctgctgctttggtgtgtgtgcaccagtgtggtctgctccaggagaggaaccggcagacttctttcagagaagcagtgttaggagataactgaaaggggaagtggttatggcggggtgcctctaaggagccccctttcctgcccaggcccaagaggttcctctcagctctccctggcaatgttgctcaggctgcttgctgggactgagagtagacaaagggactggagagaagctgggaactctggaggggataagacttgggtcaaggggggagggtataggggtctttcgggatagcatttgaaatgtaaatgaagaaaatatctaataaaaaaaaaagacttgctgggcgtggtggcgcacacctttaatcccagcactcgggaggcagaggcaggcggatttctgagttcgaggccagcctggtcttcaaagtgagttccaggacagccagggatatacagagaaacccctgtcttgaaaaaacaaaacaaaacaaaacaaaacaaaagacttgggtcaaactgatggcttggaacaaaaaagtcccacttccactgtgactagctgaatgaccatagacaaacaaaccaacaaaaattggctccttggtgctgttggctctcatggggcctgataacattcacctcattactgattggaggctgccttggggtaatatctgtaagggcttcaggcatcctgtagggtgccaaggtgtcttccactccttgctgcaggggactctcatcttccacagtgggaagacttttttttttaagattaatttattattacatgtaactacactgtagctgtcttcagacacatcagaagagggtgtcagatctcattatgggtggttgtgagtcaccatgtggttgctgggatttgaactcaggaccttcaggagagcagtcagtgcccttaactgctgatccacctctccagcccagtggaaagacttctaccactgatggtgcagagccttattcaagatgggacaactgtgcagtaactgtccctggtgctgggttgtacagatcctgcaactgaaccaatctcaaggggcattatgctgcatctgaggccactgcccacatgtatggcattgactggacctcagaaaaaggcgtgggtcacccctactgtgggattacacataatgctttgctagagcactcaattgtcagtatcgttgtcacttcttacagcttccatctcttggccacctcactgccaactgcctctgcttccagggccactttgtaacactttacaaatcttttcttactcaggagaaaacctatagaaaacggggcagggacacaagcttcagttccattcaaggaagaacttctaatcaggaagatgaagggttgaacttctcagggcttcagaccctagaaggatacaagaaatgctagggggcagtgaggtgagagattcaaccacccactcgcaatcctcctgggcccccgagcccaaagtggatgcatctgaggacagctttctctcaccctttgtttgctgtttggttggttggttgattttgtgagacagggtttcactcagcaggcagccctggctgtcctagaaactctgtagaccaggttggccttgaactcagagattcacatgcctctgcctcctgagtgctgggcttaaagacatgtgccatcaccacttggttcccatttgtttcttgtaaagtgtgttttctttttttctttttttttcattttttattaggtatttagctcatttacatttccaatgctataccaaaagtccctgatagtgatgatcagaacattgtctccctgattgaagaggacactgggattgggctctgctataaaccagacccccccatcccgagacccccaaatctcctgatattacatcctgagcctctatgagtgtaaaggagctcgtgtctgatcttccacagacgtgactttttcgcctttaagggacctctttaataggtcccccaccctctgccaaagtgtgctctctcccaccattannnnnnnnnnnnnnnnnnnntccccctttttggccctggcgttcccctgtactggggcatataaggtttgcgtgtccaatgggcctctctttccagtgatggccgactaggccatcttttgatacatatgcagctagagtcaagagctccggggtactggttagttcataaggttgttccacctatagggttgcagatccctttagctccttggattctttctctacctcctccattgggagctaaagtgtgttttctacccaaacctctgtaatgggccacattctccctttctgttgctcgtctatcccattggttcaaacctaggaagatatatttttttccttccatgagacaagaaggctgtgaaacagaggcttcctaccgtttgttgaaaggtcaatttgtccaaagccccaacatattattttataaagttttagttttatttcatgtgcatcttttgcctgtaattatatatgtgcaccaagtatgtgctgggcgcctatgcaggtcaggagagtgccaggaatcccctgggcctacagttacagatgatggtgagccaccatgtgggtgctgggaaccaaaccagggccctctgaaagagcagcaagtggtctttacagctgtgctgtctctcatgcccaagccctaccataataaacaattatgaaacatggccctaacctcagagtctcaaagtctcatttctaagttcagggccctctaaggtttatagcaacttagattcatactaggatgttaaagcttcttggtgaatttgaagccgggataaccttgtaacccaaaaagcggagacttctggagttccttcaaagggtagataggaagtttaccgtagaagtgcttttcagctccatggtcaagtttcgggtggaccaataaggtccacaaggtttcactacaagagaggctctgaggaaagcgcttgtcaacattctgacccctaccagcaggaacattacatgtgccgcctacacaatgttttgctcccccgtcctttccccgcccagtgtccattcatttaccaggtcccagcagggcggggctgtcctgttttctatccctgggctgggcacacgtcttacgagcgcctgcagtaagcagtcaacagtgtttggcccgaataggggcacaggctgttccggaagtggacagtgtcagaggttctagccggagaggagggagggagagccgctggggagcctcattgccccagggccgagggtggagcctttcccagtcgggaaagggctgggcccagcctacatgtgagggcaggacagagtgactgccagcgctcccttgagaagtctgggtgtagcacgctggcggttgacttcccaggactcttctgtgacctgtgagccgaggattactgggtaccccagattcccagaacccagtcctggattgcagatctgtaaggaccgcgaaagattgagcaaagaagtctttctggacttaagagttccggaacaggacgtccagcccatctccggatcccgactggatccacaccttcagcctcgtgccctgtcccgggttccccgcgcccggggccccgcgcttgagcgcccccgcatggcggggccatgtcctagggccggggttctagaacgggcgggcagctgctggcaggacccgctggcggaggcgctgagccggggccgctcgtctcctgcggtcacgggtcggggctgcgcgcggagccggcctctcagtgtggtctacgtgctgacccgggagccggggcccggggtggagcccgggtcgggaaccgaggcagagccgctgccgttgcgatgcctgcgcgaagcctgcgctcagctccagggcacacggccacccccgcagctgcgcagcctaccctttgcgacgctggcgctaggcgacaccgctgcgctggactccttctacaacgcgggtgagcgacttggggcggggcttgagtctaggcggagcaaggggtggagctttagaaccctgacggggcgggtgtgggtaccaggtctagggaatttacggtaaactaaagccgaacttgagacaaggcagtaacgacagggcatttagtggattatggatgtgatgggcttgaggctggatctggggattcaggcctggctccggagtttaagtatctttcggtgagcgtggtgccaagcaggtggggcggagcaggcgaactctaagggcggggctggggagggacggggctgagggaggggcagagctgcgcttccctgcgtaagcgggagaactctttttcaggatgatctctcgttggacttttgagggtgaatcaggcctgagacggaagttcggtctatggcaaggggccatctctgcaggattggggttgataagtcctagcatactacatcccacatgggactaaaggggcgggaaaggaagtactgaggcaactcttcgggactggattataggagaaagggattgtatttggagactaggagtcgaaagaaaatgggtggggcaggggtgggtctagaggagacacagggagtccaagggtgaggttggaagatagctattcctctctttcccacctaccggatgctccacctcatccctatttgtttatctccgagtcagagagccttgtatcctggacatctgctaaattgtagcttaaaaatgaaggctgacccggtcagaccacagataaagtggaatcatctgcgttgactcatacagtccctcccttgcggacattgtcacttaaagatggctggatacagtaagctacacaaacacacataaaagcacgacgttgtcttcacacacgatgatgcagatcaccctcaggaccctggcttcaagattggagagatggttctgaggttaagagcacttgctgctcgcccagaggacccgaggttcccagcatgcacacggggtgtgcatgctcacaaccacctgtaactttatctccagaggatcctgatgccgctttctatcatacactcacaccaacacacacatacatataaataaaacaagagagagaggagagagagagacagagaaagagacagagaatgggacttctttttgcaaagttcctgtctcctacataacctggaagtgctcagtgggatgaaggtccctgggcatctcctgtaacaccaccaataagagtactgtgaaaaccccgggaagctctcgagagcagcaccgactttggcatgaggtgcaggcaaggcacttgacgtgacatgcatctccaggctccttcgccactgagctgggcttccacactcaggcctacacttctgtgtccacagatgtagtggtgctggaggtgagcagctccctggcacagccttccttgttctaccacctcggtgtgcgtgagagcttcagcatgaccaacaacgtgctcctctgttcccaggcagagctccctgatctgcaggcccttcgtgtaagtggccagggggctgggggctgggaagacaggtgcagggttggggtgaggccaccccagaatgccagtatctgattgtctgcctcctgcaggaggatgttttccagaagaactcggtgagcagaatctacccctcatgccaacgttataacctctgacccctactaaccttcctagcttcctcctttgtctctgacatcagtgtgaccctcagcaccatgtagcatccttttgtgacgtgcggctcttttcttctattcctatcttcaccagtactaaccgccagtccgtctctaaccctgtgctgacctatgtgtgacctccactaattgctgccttcttcccaccaggattgtgttggcagctacacactgattccttatgtggtgacagccactggccgggtcttatgtggcgatgcaggcctcctgaggggcatagccgatgggctagtacaggctggggcgggcactgaagccctcctcactcccctggtgggccggcttgtccgtctgttggaggctacacccacagactcttggtaatggggctcagggggaggcggtactaggtagagactgatgaaggtaaagtgtgctggggctgaggggcaggctcatctctctctctctctctctctctctctctctctctctctctctctctctctctctctggtctctgggcatcagcggctatttccgggagaccattcgtcaggatatccggcaggctcgggagcgattcagtgggcagcagctgaggcaggagctggctcgcctgcagcggaggctggacagcgtggagctgctgagccctgacattgtcatgaatctgctgctgtcgtaccgcgatgtccaggtgtgtggcgttcggagaggccatgacataggatataactccagcactcaagtgcttgtgtcaggaggggcaggagtctgaggtcatcctgtttacaagcaagtctaaggccaacctgggcttcaaggaatcttgtgtgtaaacctaagaaagagaccattgtatgacagacagatacaagtgcagctcctggctgagcctcactagtggctttaagtaaattgtctgagcctcaattttcttatttgtttcatcatcattattattttttaaacatggtctcactgtgcattcctggctggcctggaactcaatatgtagaccaggctggcctacatatccacctgtttctgccttctaagccttgtgccaccacacctggctttattgttttttttttttaaagatgcattttatttttttaattgtgtgtatatatgtgtgtctgagttagggtttgtaccttgtgtgtgcagttacctgtggaagacaggagagagtgttggatcctttgggactggagttaaaagaggttgtgaacttcctgttgtgagttctggaccccaaactgcagtcttctggaagagcagcctgcactcttaactgctgctagttatctcttcagcccatatttccttcttttttgagggatgatgtggtcattgcctcacagggcattggtgaggttagaaacacccaatgtggggtgcatagtgggttctccaggaaggtgtggtctgtaaatctgcttggcccgagggaggtgtgcaaagtcttcaggttgtgggtagtagaaatttccttcaaactgacagtagttacccctgtcttaaatcccagcactcagtaagcagaggcaggcagatatctgagagttcaagggtagcctggtctacagggtgaattccaggacacccagggctatgtagaaaaacctcatctcaaaaaaacaagcagaaaaaatgatttctgctggcagtgatggtgcgggtctttagtcccagcactcgggaggcagtagcaggtggatctgtgagcttgaggccagcctggtctacagagagagttccagggcagccagggctaccgatctttcctcgctgtcaagggctcatcgagatgctgcacgctgtctcccacaggactactcggccatcattgagctggtggagacgctgcaggctttgcccacctgtgatgtggctgaacagcacaatgtctgctttcactacacatttgccctcaacaggtgggtaatggggcacggcttgagtcagagtcttggaagtctctgtgacctgccaagcaagagcactgcaatctggaaccactgctcctcgggtatcttgctaacctgggtcctaatgtcacaaggttcctgttggtctgggctaaggatgcatggtggggacagaggacgtgggatccccttgatagggtcatagctgtccaaggtcgctactccttagagttgtttgcaactagaaatcccttccatctggagtcactaactctagagatcaatgcttcccggggttagtgtcatttgaggctcattaatagtaagcccccagaagggtcccttccgtttatggtctattgggtcccaggactgggtgggtcagagccatcagacaggtcttcagtgtatgttcctccgccttaggaggaacaggcctggggaccgggagaaagccctggctgtcctgctgccattggtgaagtatgaaggtcccgtggctccggatctgtactgcatgtgtggtcgtatctacaaggacatgttcttcacttctggcttccaaaatgccgggcacctggagcaggcctatcactggtaattcacataagagtaaagagagggcttagcgatgggactgaagggtggggttgcgggcatccattcagcctggcatcccctgcccgacccgactccaggtaccgcaaggcgtttgatgtggagcccagcctgcactcaggcatcaatgcagctgttctcctcattgcagccgggcagcatttcgaagactctgaggagctccggctgattggtgaggcctgctgttagcccacagcaccctgcacaggctccaaagggcaaggaaagggccccaggcgggaaaaagcgctgactcaaagtgggcttcgagactgatcggtgcctgaggtctgaggtctcaggagcctttgagtgcctctcttcccaagcccacacttccggttgtcacactttatcccacatctatttgtgccctagctctcccctgtgctaggctcttagcgctgagatcttgccacacctaccagatctacattcatatccacactcctgtgcgtgagggccacagtgggacccacacttgagccttactcactccgggacctacactggattgagcccacgccaccctcccccaggcatgaagctggcctgcctgctagcccgcaaaggctgtgtggagaagatgcagtactactgggatgtgggattctacctgggagcccagattcttgccaacgaccccatccaggtggtgctggctgcagagcaactgtacaagcttaatgcccccatttggtaggtggccccttcttcagccctgcacccatgcccgttggcacccctccccaagccatgaccccaatactttgatgtcactacgatagatagacagtgcccgtgttcccctctgttcgtggtatgtgatgcccgtatcctgactacatgcagctgagtggcaccagccggctcctaggctgagctgaggccaaggctgtctgtgcatttaggtacttggtctccgtgatggagaccttcctactgtaccagcatttcagacccacaccagagccctcaggaggacccccgcttcgagctcacttctggctccactttctgctacaatcctgccagcctttcaagatggctcctcctcaggaggaccagtgcctggtaagggcagtggggcctagggacccaggggcccagggacaagcacattatgaccgatccctttccccgctactgcttacaggtactggtgctggagataaacaaggtcctgctgcctgccaggcttgagattcagggaacagaccccatgagcgcagtgaccctaagcttgctggagccagagactcaggtgagctctgagacccattactcaccgatccacctttctttctcctatcctctctagtcccagcgcctccacaacctccacccctttcttctcacaggaggatccttccagctggaccttcccagtcacctccatctgtgggatcaggtgagagctgaaccttccggcaagctcctgtgccaccaagcctggcattcagtagcctctcttcttccctagcacctccaagctggaccagcgctgctgcttccctgtacgtacttcctccggcccaggacgtccagctgtgctttcccagtgtggagcgctgccagcggtgcgctcaacctttctgagttggggatgggacgcccaggggacggaacggaccaggtgctcctgggggatggttcctggctgttccccttccagctgtttccccctcttcaggttctgtggcctaattcaggtcttggtgatgaatccggattcctccgcgcccactgaggaggcagaaggcgcaagggaagtgctggaggtgaggctgcagaaatgggggggttggaggagagcgaggggtgaagggtccctgctaagcgggtgctctgggttccacagtttgattatgaatactcggagaccggtgagcggctggtgctgggcagaggcacatatggggtggtgtatgctggccgagacaggcacacgagggtacgaatcgccatcaaggagatcccagagagagatagcaggtggggtgcattggtcgatgaaggtctggggtctcgggagggtatatgcaaacagggtgtgtgtgtgtgtgtgtgtgtgtgtctgtctgtctgttgaggaaacgtgagaactgactgattgtgggcatggaaagagctctttagtggctggactaggggtggtggcccttacagtagataagagaggtctgtgggcggggtgttggatctgggggcatggtttcatggtacaggaccatgggaggttatctctgctcacatctgcccattgctctctcctcgacactcccagattctctcagcctctgcatgaagagatcgctcttcacaaacgacttcgtcataagaatattgtgcgttatctgggctcagccagccagggcggctacctcaagatcttcatggaggaagtgcctggaggtaccagccctgcgtgggaggggagtgaaacctgaggtgtggggcgtgggaatggagccagaccagggtggcaacccctgaggggaaatgaactctagcgtgcgtgggtatcacctagaattagctgacagggctcactgggtgatggaagtctgggtcatgggaatgggtgtgtttgggctttgatcagagggatgtaggtagagtaagcggacatcaattataaacttggtttgtctctgcccaggcagcctgtcctccttgcttaggtcagtgtggggacccctaaaggacaatgagagcactattagcttctatacacgtcagatcctacaaggactcagctacctccatgagaaccgcatcgttcacagagacatcaaggtcagccctgtggctgctccgggtgtgtggagacacagtaccaaactgaagctgacagtaatggtgggagagagcacactttggcagagggtgggggacctattaaagaggtcccttaaaggcgaaaaagtcacgtctgtggaagatcagacacgagctcctttacactcatagaggctcaggatgtaatatcaggagatttgggggtctcgggatgggggggtctggtttatagcagagcccaatcccagtgtcctcttcaatcagggagacaatgttttgatcaacaccttcagtgggctgctcaagatttctgactttggcacctctaagcggctggcaggcatcacaccgtgcacggagactttcacaggtaatggggggtgggggtggggtgagggtgtcaagctcttggagacttctggggaatggagttttttttcttggcacagagttacaattttaaagatttatttatttattttatgtatatgagtacactgtagctgtatagatggttgtgagccttcatgtggttgttgggaattgaatttaggacctctgctctctctagtcggcccagcttgctcagtccctgactgctctggcccaaagatttatttattattataaataagtacattgtagctgtcttcagacacaccagaagagggtgtcagatctcattaagggtggttgtgagccaccatgtggttgctgggaattggactcgggaccttcggaagagcagtcagtgctcttacccgatgagccatctcaccagcccttgaattacagttttaatggtgaatggaaggaatctggctggagacaggtgactggatccaggaaccgctggtaaaatctatactccaaggttgggtaactaatgagaaagacctcagcatcgaaaacggatgcaaggccgcgtgtgttgggggtgtgagacgggttggtagaatttgaagggaggacgatgtagcgtcacgtacaagccagaaccctcctgatggttgaacgctatgcagcctagaatgaaggacggaagcttggcaggtgacggggcctaggtgtgcacatggccagtggatgatggggacttgatgcctacctggcattgttgttcctatttgtggtctagggactctgcagtatatggccccggaaatcatcgaccagggcccgcgaggatatgggaaggcagctgacatctggtctctgggctgcactgtaatcgagatggcaacaggtcgaccgcccttccatgaactagggagccctcaggctgcgatgtttcaggcgagtctctctggggtgtggcctacggagggtgggcggagccagatggggccagtggggttatctatcccatctgccccacctccgcaggtgggcatgtacaaggtacatccacccgtgcccggttccctgtcagctgaggcccaagccttcctcctccgaacttttgagccagatccccgcctccgagccagtgcccaagagctgctgggagaccccttccttcagccagggaagaggagccgcagcccgggctctcctcggcatactccccggccctcaggtgctatgggggtggagggggacaacctagtgaaggggagaggggctgatgaggcgaaaagactaacagcttgttcctccctcaggcgccccttccggtccttccagtccttcagctgactcagccacacagtctcagacattcccaaggccccaggcaccctctcagcacccacccagccccccaaagcgctgccttagttatggggacaccagtcagctccggtgagcgcctagggtcctggagtgggttctcttcatctttttttgccgttgtattaatttcctccagaaaaaaaaagcctccctgggtcgcaaacaccctgaccacttccaaggaccgtatctactacctcctgccctctcccagatgccggtggcattcactctgccaacccccagatgggcttaatttctattatccccgtgaagtaggcataaaagagccaagattcaaaccctgcaacataggtggttggttgcatggtgttgcccaccctccatctaatgcccctcattgtgcccagtgtgcccgaggagcccgctgccgaggaacccgcgtccccagaagagagttcaggcctgagtctgctgcaccaggagagcaagcgccgggccatgctggctgcggtgctggaacaggaggtgcccacactagcagagaatctcctggaacaggaacaggtgggcggcccgccccagcgccccctggtggtcgagctgggataagaatttatagtgcaccggcgagcatctctgttgactgcggatgcgaacatccacggacgtcccctctttttaggactctcgactcagcaagattcatgtggaacttctgcttcggtgccttggggcacaaatccacactcctaaccgccggcagctggcccaggagctgcggaccctgcaagctcagctgcgggcccagagcctgggccctgcgcttttgaaggggccgctcttcgcctttccagacgcggtgaggaagctatctcgaagttagggctatgcaataacaggtcgcgagcaagatcttgatgttccaggattctatgatttccaggaagacgcatgtccagtcctggcttccctgtcccacccttgaccccaagtccgcccacctcttttagactgcagccgactttctagggctttgcaactcaagccccacctctgtttgagattcaactgtctcaaccgcgccttccttccctccccaggtgaagcagatcctccgcagacgccagatccgcccacactggatgttcgtgttggactcgctgctcagccgtgcagtccgggcggcgctggcggtgctggacgcgggtaggtggggttggatcccgccggccggccggggcggggtgcgtggccctgggggcgtggcgaacataaaattggtacttcgcggccctcccttctccctgaccgtctggggtcctaaacgggcgcggcgcccacctggagctcagtctactcaaattggtagagtcggagaagaaagcggtcttaccgaggtcagaagagtcgagtaaagaggagtcccagcagaaacctcaggagagccaggcgctgcagagccagctcccaccagagcagggacccccatcgttgatggtggagttgggccttttgcgagccgagactgacaggtgaagccttttggaatcactcggataacctgcagaggcttcaatctgcaggcccttccattctaccacccctaccttcccacaggcttcgggaccttctggctgagaaggaacgtgagtgccaggcgctggtgcaacaggccctgcatcgggtgcatgcagagaccaggaagtatgccccagcttccgagaccccaggtgagccgacttgactgggaaatggtgaaggtaaggccacagaggacacctttgccctccctcatcacctgcctttttgacagccactctcccaaaggaccagaacctggtgcggtggctacaggaactgagtgtagatccagccactatccaaacggtgagtaagtgtgagctggctcccaccacccacccaccaaaggcatctcctctgtcttccagctattcaaactttgtcattgctgcaaagatgctcaatactgaaagagcccttagtatgcacctctcctctcattatagggatggggaaactcaggccacaagggggccgcctgcctgagagttctgttagaagcaagaacccgagtttctagttgaatttctgtgcaacttgatctttctctgtttctgtggttctcggttcataaccagctcctgagtcatagcttcacccttcaaaccctgctcacctgtgccactcaagatgatctagtctacaccagaatcaggtatgtcttgggccttccaggggtgagtcatgtagcacttgctagcaatttcaggacatccccttccctatgggcctggcctgcctttgattcctccctgaaaaccatagtggttcctaaagagagagcatgggctgccttctggctgaattacattgatccctgatgtccccaggggagggatggtatgccggatttggagagccatcttggcacagcgagcaggagccacatcggtcaccccagtaccccgggacgctgagtgatgacatcaaaggacacagatacggatggatgaacagagaagacacaaacagctttggacacacctgtcctagaacccaggagcaactacagggaccaggcccaaccccaatgggtggaactaactagggaggcacccaaaggacactacatacaatcatagactattaaacagaacacttgctaccatgcttgtcttggcaacttcagaagggtgttggggggagtgaggagtgtccaaggagaagccccttgaggtctccatgtctgagtgaccctttttcatttcctgggctttcaagctagtgccttactacccagacttcatacccagttaagcagtcagtagctctgtaaacagactttattgattccggccatgggtgtgctttaggtggggggtccacagaggggtttgacaaggctatgccctggggaccaggttggttctgaggggcagaaggccatccacccactcacagggccgctccaggagtgtctgccacagctgcttctcctccggtgtggaatccatccagggcacctgaagcccataactgctgcctggatgtgggtgagccaaagtggaagctactgttaccttggagacctcgggtcccaagagcaactttctggtcccagattatgcattgtgcccaagcatcccgaacctcccagcttggctcccctcaagggcctgctctgctcacctgtaccaaggctgaggcgtgtgccccccagctggcgactggccagggccccatggtcccacagggagagctcggcacaggcttggcgtaggtcagcaggcccgaagccgtcataaaccatggtgtggttgaacacagggctgagacttcttcgaaccactcttgtgcgttggcggctggcccgactgtcatcaggcagcactgagctgcgacagggtaataaaggagggctagtcttaggcaatcaccctctgacactccctccctgagccagccaggcaccatgtcctgtcctttcatatggccgtgttccctgaccgttccctggccctggcctgagatcaggtctctagccctcttacactaatcttttcttaaggcttcgtacgtgaagctaactgttcacaggattccagagagaagtctctgaaatgcaattctgctattttctggcccagtaaccttcagtattccctgccctcccctttagtttccaaagcctcaaccactctgtagagtagaataatattactctgatatagagtaatagaaaggaagccaggacgggagccccaactcagagcagtctactctgtttcactcctggagggtgcggtaacaacacctgaagcacccagaaacacttttagaggttctgtaaaaacttactttgtaaaccacagagctggggtgtagcttagtggtagagccatatatgtgtgtatgtatatatatgcatgcatgcttagggtgactgaagcattacggtcagttcgcagcatgttaaaagacaactacaatcaccaaccattgactcacaagttcagagccaagccccatagcttgtccctccaagagttccaaggaggacccttgtggcctttgcatcatagtgcgtgcatagtaggtgcacagcctctgcagactgcagcctatgctggctaatgtcaacttgacacaaacttgagcagtggttctcaacctccctaaggctgtggtcctttaagacccccaaccatgaaattatttcattgcttctttgtaactgtaattttgctactgttatgacttgtactgtaaatatctgatgtttgccacccacaggttgagaaccactgagctagagtcctctgagaggagggaataagctaagcaaatgcctccataagatgggtcatgccgtggccaagcctgtagagcatttccttaagtactgattgagcaaggctaagcaagccttggagagcaacccatgaggagccaggcagtcagcagccctcctctgtggcctctgcatcagctcctgccttcaggtccctgccctgtttgagttgctgccctggcttccttcagtgatggactacagcgtggaagtgtagaaccctttcctccccaacctgctttctggtcgtggtgtttcatcaaaataatagaaaccctaaccacatagagccccttagttccccaactcagattttgttgttacacaaggtctcactatgtagcttgggctgacctggaactagcaatgtagaccaggctgtcctggaactcagagacacacctgcctttgcctccccagtgctgggattaaaaatgcacaccaccaccaggcagtggtgacgtatgcctttaatcctagcactcgggaggcagaggcaggtggatttctgagttccaggccagcctggtccacagagtgagttccaggacagccaaggctacacagagaaaccctgtctcgaaaacaaacaaaaaaataaaacccaaaaacatgccaccggacctagcctaagcttttattttgagacagggatcttgtgtatcccatgtagccttaatgaccttgaactaatcctcctgcctccaatcctagtttatgtaggttgttagagatcaacccagagcctcttgcatgctaagccagcaactccaccaacggatacccagccccagcccccaactccaaccccctgcctggcttatcacctctgccctgctgatcttggctggggggacaggtggatcagaggtcaagagcagaagggactaacaccttaggcggcctctcaccattgaatgtaagtgtccagggatcctggtcgcagtggtaccaggctctgagcttcctttacccagaagtgtaactccccactctgaggctgtcctcctcctgtggggacactccagttcagactaccacctcacagagtgggtgggtctcccacctccatgggccagtccagcttaagctctctcttggcagtcacttaccctctgagccggcagggacatacttaagggacagagacagcagtccacggctgggaagctcatctggagatggaggaacctgaaaaggcggggagtggagagaaacaggattatgtgtgagaagggtgttggggacagggcctctactgaggagcccaatggcaacgttccccagaagaggcgccctggctggcaagcctggcctaatggtatcagtatgaggctaagtgaggctctgcaaaccggtccgttgggtgtttggtccagtgggcctgtgggaatatcagtgactgcacaccagcccttacccgaggctgcagggggagccaggtagcctcagagtcccagttccacgtgtctaggggcacttctacttctcccagaaagatgttgcgacccagactttcccggtgccacacggacaggctcagcacgcggcctgggagatcagcctgctggacagagtgctggggacaggaggtgagtttcagaggcatgccctggcatcgctgtggctcacctgttagctggagatggtctcccaggttcctttctaggatgggctcctgaggcagggttaactggggtcctagcacaagttgtggggcttcagattgcaagaccactagctgtcttgtcattactcttctggggccgtcaggaaaattaaggaacccggcagcccctgccactcaccccactgaaaatggtaccctgtttatttgcagggatgacagaacccttgatgcctcacccgcagagtctcgttgaagatcgggttcagattccgtttcttcactgacgtcttacgcttgctctgcttatccgggaggaggtagcttttcacgtagctgggcaagggatgtgaaggctggaggtaaggaagagcccttccagagctttgtccagctctggggtcttctctagtcaccatccataacacagcgtgcccatgtggatgttaattaacaggcatccaatttaagacgcttcccaatcatattgttgtgcccattttgaagaagagaaaactgaggccgaggcagttaagtggtaggctgggtgatggagccccgcccctcaggccccctgcagcccacctgtgacgtaggcactcacggatcggagcggcgtcgccgggcagcggccaggccctggcactgaatcacctgtactcgcagctcagaggtgccaggctcgtagtgcagcgagaagagcacggagcctcgcacctgcaccgtgcctgcctcctctccggataggctcatcaggctgccgctcagctgtgggcggggcgggtggatgatcagggtccccatagggaagcttcccactgtggggtttgcctgggctttcccagctcccagcccctccctagctcttcaccgtagaggaattgaggctggacacagaggagctgctgctgagcatgcggtcaagagaggggccgagccccggggcctcttctccattctccaggatcttggaggtcgccttggactggagaggggagaagcgacaggggcgccctcttacttccctggaccttgcaggggagttgggggtaaggggtcattcaccgacggttcccacccccagggcaggtacactctcagtctggaatccgctcccggtcttgagaacagccagtggctactcccgcctacctgggctggagttggctgggactcctgctccgccttctgctcaggatccagctctgggtccgcctctgccacctgcacacccccttcgccaggggctggaatggggtacaagttgctgaaagagcccctctcctatgtgtccctaagcaaacctggagggttcacctgtcagcttcaggccccaggggtgacctagagttgtccccgaaggccaagttggggtcccaggaagaagaggaaggtggacatgatggttgtgggggcagtcattaaaaatggcctctgatcccctcaacctcttaggttccccagcttaccctccagctcacattcctggtcctggggctcctcctcctgaccttcggaagcctttgagggtacatatggtgaggacaaatcaggcccctgaagaaagcagagggtagaggtcacggtgggggttaatgagaaagggatcaagggttatgctggggtcagaggtcaaagactccagcctgctcaccttgcttggtctgagttagagtagggctgccctcagggcagggctacctaccagctgcaggaccagtcaagcctgtacttcacaccctggcatcccaggcctgtctctcctgccgggcctgcctgactcctaggctcagctggtgggggccccaacatctgagtccctggcctcacccgcctcagtccaaccccacctttgctggcgacacctcgtgtgtggttgacaatgaccttggactcctgtttctacctcctgagtgccaggatctgaggtgttcaccacaatgccgggtttatgtggtggctggggaccaaacccagagcgtcatgcgtgttaagccagcactctatcaactgagctacatcctttgtgtttgtttttcaaggcggcgtagggcggggttccctgtgtagccctggccttctgaaactctagagttgttaaaaattggaggctggcctcaaactcacagagatccacctgtctctgcctcccaagtgctgggattaaaggggcaacctgccccacaaccacagccctgcgtgtatccttattctttggttttgttgtttatttagacttatttgttttatgtaagtacagacacaccaaaagagagcatctgaccccactacagatggttgtgagccaccatgtggttgctgggaattgnnnnnnnnnnnnnnnnnnnnnnnnnnnnnnnnnnnnnnnnnnnnnnnnnnnnnnnnnnnnnnnnnnnnnnnnnnnnnnnnnnnnnnnnnnnnnnnnnnnnnnnnnnnnnnnnnnnnnnnnnnnnnnnnnnnnnnnnnnnnnnnnnnnnnnnnnnnnnnnnnnnnnnnnnnnnnnnnnnnnnnnnnnnnnnnnnnnnnnnnnnnnnnnnnnnnnnnnnnnnnnnnnnnnnnnnnnnnnnnnnnnnnnnnnnnnnnnnnnnnnnnnnnnnnnnnnnnnnnnnnnnnnnnnnnnnnnnnnnnnnnnnnnnnnnnnnnnnnnnnnnnnnnnnnnnnnnnnnnnnnnnnnnnnnnnnnnnnnnnnnnnnnnnnnnnnnnnnnnnnnnnnnnnnnnnnnnnnnnnnnnnnnnnnnnnnnnnnnnnnnnnnnnnnnnnnnnnnnnnnnnnnnnnnnnnnnnnnnnnnnnnnnnnnnnnnnnnnnnnnnnnnnnnnnnnnnnnnnnnnnnnnnnnnnnnnnnnnnnnnnnnnnnnnnnnnnnnnnnnnnnnnnnnnnnnnnnnnnnnnnnnnnnnnnnnnnnnnnnnnnnnnnnnnnnnnnnnnnnnnnnnnnnnnnnnnnnnnnnnnnnnnnnnnnnnnnnnnnnnnnnnnnnnnnnnnnnnnnnnnnnnnnnnnnnnnnnnnnnnnnnnnnnnnnnnnnnnnnnnnnnnnnnnnnnnnnnnnnnnnnnnnnnnnnnnnnnnnnnnnnnnnnnnnnnnnnnnnnnnnnnnnnnnnnnnnnnnnnnnnnnnnnnnnnnnnnnnnnnnnnnnnnnnnnnnnnnnnnnnnnnnnnnnnnnnnnnnnnnnnnnnnnnnnnnnnnnnnnnnnnnnnnnnnnnnnnnnnnnnnnnnnnnnnnnnnnnnnnnnnnnnnnnnnnnnnnnnnnnnnnnnnnnnnnnnnnnnnnnnnnnnnnnnnnnnnnnnnnnnnnnnnnnnnnnnnnnnnnnnnnnnnnnnnnnnnnnnnnnnnnnnnnnnnnnnnnnnnnnnnnnnnnnnnnnnnnnnnnnnnnnnnnnnnnnnnnnnnnnnnnnnnnnnnnnnnnnnnnttcttaaggaataacttgggattctccaggttgagcagcatagtaatcactgttcattaagtgcttattgtgggccatgcctgatagtttattttgcacattacatgtcatgtgtgcgtggtatgcatgcctgtatgctcccatgtatgtggtcatacgcatgtggaggtcagagtatgaacttgctcatcttcagctctctccatcctatatactgaggcaaggtctctcacataagctctaagctcagtgctttggtgagtctagctagccagcttactccagcaatgccctagcaccattgccggagtgctgggacagtgagtgggccaccttacccctggcatttatgtgggtgctggggatatgaactccatttctcaagcctatgcagcaagtgttttacccacggaaccatctccctgaccccttagctgatgttttagtggagaaaggggaggttcaaggtcaaagtaactgcccaaggttacacagctgttcccagacactgcttgtcactcttgaggtcctctgcccttctgctcctctggggagacgaaatatcttcgtcttggaagtcaaaagtactcaaggattaggggacatgctcatggctatatcaggtttatatatatctgggagctgccaggaaccgatcagggtgacctatgggcacacttaaaggctttgacactaggttctaagggctgagggagggtccagaagggtagtactaaggacaggcagtatctgttcaccaaagtatcctgtcccaaggtggcggccagagtagaaaaacccaaagacatggaggctagggagggacctgtcacaggtttgagagaagtgaagagctctgagctagccaaggtcaatggagaccaaaaggtagcaccaagaaccacccagacccaaccaccagcatccaaggaccccgaatcccttccttctatctgatggctgtcctgtctcacctgacccgcccttcctccagctggcgcaggtgggcatctcgtttgaggacatcagagatggcctcctgttcctcctctgtcaggaagctgaggtccagcaacccctcaacttcagatcctggtccatgtgccatggggagggagggcagggcccaaagcctctcctgagatgggtggcctctctggggcatcagctggggttgtgccccagctgggcatatgtagcttcctgtggataaaccaagggctgatcagtatctctcaaatgcacagcacacatcctgaagccagctgccggctgtctcccaagcatatacaggagtaataaggaccaatcaaaggaaggccaggtcaaggtgaggtggggcgtaagtgatgcactgcaagagatgcacatatgcgcatgctcctaaggatgaatgacagagtattgcaagacagtacacgctgatacacatacccactgttctacacacattccagatacctagacaaagacagttacatgcacacacatccccatgaaggaactgtgcgcacacatacatcatgaagggactgtgcacacatacccagagtcctatgcccaagagctgtgcagcacagtaattcttaaacctgcacacagtatgcccactcgaggacaagtgtgcactcacaagaataagtccctgcatctccacagatctctctggatttcctcacacactgtctaacctgctgcatactactagaaactaaggatagctcactcccctcaaagctagtattttgcacacaacataacctgagtcttaatgaaatgcaaaaatatacctgcataaacatgtggatgcatgcacagccctccccaccgctcatgtttatcccctacctagcctgcctctgcccttgcctccctccaccctgccctggcccatttggccttcctgtctgaggcaacctcctccccaaccctcaccccaacttcctccccccactcccatagcacccagttccactgaggccacctgcctgagattcctccccaccagccctttctctaggcggagcttctgagccccttgggtctgacccccgggctccccaacctccagacttggctggaagcctcagctggcaaaacaactcatgcccaggtaccacagccactccggaaggaaaacattgccagccgagaggggcatgtggacatggcaggggacctgcactcagtagtggccctggtctgggcccgctgggcagtctctctctttcccagcccctcctatgccaggcccccagctggggttgaaaagggaggagggcagctcaggggcaggtcctggcttgtgcctgtctcctgccttggtctcctcccagctgagtcagtatctaagcacagcaagcaagcgagcctcctctcctaccccactttccctccgggggtttctgcatctccatcgccatagccctgggcccgatgcctgctcactgacagtgactctttctctgtacttgaggtgctggtatcaagctagcttgggacttttctatggcggggtgtatgagcatcgccgtgtcctgttgtcctgctgcattagtagacatgtctgcaagccagggtaaaacatagcatctgtccctgagtgctgtgttgccttatgatactacagagtcttacaggagtgtcgctgctgtgggcagtgacttgctgggagccagtgccgtgtgggtatgtgcatttcttcctgtgtggtcagccagcccaggctggctggcttgtggtgtgtatgctagtaccccggggggccaccagatatgggagtgaaggtggaagacatttggcaaaattgcctggctttgtctgacaggttggcttggtctgggctgtgggcctatacaaggccaggatctctctacctcaagttgtatctctttcagaggtagattaaggatcaggtgtcccttgccctgtactaacactgtgggacagggaccctttagtgatagaaagtctgtatgtgtatctgggcaggccagagtcataatcttgcttacacctcacccccactccgcccaaactcctgaggtaccagaatgtggtcaggacaccaggtggcagtgcctgtcccttagaccactgggtgtgttacctgtaagggtccagtagggacgacaacttcaaaggcgactccagctctccaggaagacagttcagagactagaaaggctgtggggactaaagctgactcgcccagcagctgctgccccagtcccgaggaggtggaggaggaggagacacctcagcagggcctggtgcaaaaccg

SEQ ID NO: 8 - DNA, 4325 bp, Mus musculus
tctgggtgtagcacgctggcggttgactcccaggactcttctgtgacctgtgagccgaggattactgggtaccccagattcccagaacccagtcctggattgcagatctgtaaggaccgcgaaagattgagcaaagaagtctttctggacttaagagttccggaacaggacgtccagcccatctccggatcccgactggatccacaccttcagcctcgtgccctgtcccgggttccccgcgcccggggccccgcgcttgagcgccccgcatggcggggccatgtcctagggccggggttctagaacgggcgggcagctgctggcaggacccgctggcggaggcgctgagccggggccgctcgtctcctgcggtcacgggtcggggctgcgcgcggagccggcctctcagtgtggtctacgtgctgaccgggagccggggcccggggtggagcccgggtcgggaaccgaggcagagccgctgccgttgcgatgcctgcgcgaagcctgcgctcagctccaggcacacggccacccccgcacgtgcgcagcctaccctttgcgacgtggcgctaggcgacaccgcgctggactccttctacaacgcggatgtagtggtgctggaggtgagcagctccctggcacagccttccttgttctaccacctcggcgtgcgtgagagcttcagcatgaccaacaacgtgctcctctgttcccaggcagagctccctgatctgcaggcccttcgtgaggatgttttccagaagaactcggattgtgttggcagctacacactgattccttatgtggtgacagccactggccgggtcttatgtggcgatgcaggcctcctgaggggcatagccgatgggctagtacaggctggggcgggcactgaagccctcctcactcccctggtgggccggcttgtccgtctgttggaggctacacccacagactcttgcggctatttccgggagaccattcgtcaggatatccggcaggctcgggagcgattcagtgggcagcagctgaggcaggagctggctcgcctgcagcggaggctggacagcgtggagctgctgagccctgacattgtcatgaatctgctgctgtcgtaccgcgatgtccaggactactcggccatcattgagctggtggagacgctgcagcttttgcccacctgtgatgtggctgaacagcacaatgtctgctttcactacacatttgccctcaacaggaggaacaggcctggggaccgggagaaagccctggctgtcctgctgccattggtgaagtatgaaggtcccgtggctccggatctgtactgcatgtgtggtcgtatctacaaggacatgttcttcacttctggcttccaaaatgccgggcacctggagcaggcctatcactggtaccgcaaggcgtttgatgtggagcccagcctgcactcaggcatcaatgcagctgttctcctcattgcagccgggcagcatttcgaagactctgaggagctccggctgattggcatgaagctggcctgcctgctagcccgcaaaggctgtgtagagaagatgcagtactactgggatgtgggattctacctgggagcccagattcttgccaacgaccccatccaggtggtgctggctgcagagcaactgtacaagcttaatgcccccatttggtacttggtctccgtgatggagaccttcctactgtaccagcatttcagacccacaccagagccctcaggaggacccccgcttcgagctcacttctggctccactttctgctacaatcctgccagcctttcaagatggctcctcctcaggaggaccagtgcctggtactggtgctggagataaacaaggtcctgctgcctgccaggcttgagattcagggaacagaccccatgagcgcagtgaccctaagcttgctggagccagagactcaggaggatccttccagctggaccttcccagtcacctccatctgtgggatcagcacctccaagctggaccagcgctgctgcttcctgtacgcacttcctccggcccaggacgtccagctgtgctttcccagtgtggagcgctgccagcggttctgtggcctaattcaggtcttggtgatgaatccagattcctccgcgcccactgaggaggcagaaggcgcaagggaggtgctggagtttgattatgaatactcggagaccggtgagcggctggtgctgggcagaggcacatatggggtggtgtatgccggccgagacaggcacacgagggtacgaatcgccatcaaggagatcccagagagagatagcagattctctcagcctctgcatgaagagatcgctcttcacaaacgacttcgtcataagaatattgtgcgttatctgggctcagccagccagggcggctacctcaagatcttcatggaggaagtgcctggaggcagcctgtcctccttgcttaggtcagtgtggggacccctaaaggacaatgagagcactattagcttctatacacgtcagatcctacaaggactcagctacctccatgagaaccgcatcgttcacagagacatcaagggagacaatgttttgatcaacaccttcagtgggctgctcaagatttctgactttggcacctctaagcggctggcaggcatcacaccgtgcacggagactttcacagggactctgcagtatatggccccggaaatcatcgaccagggcccgcgaggatatgggaaggcagctgacatctggtctctgggctgcactgtaatcgagatggcaacaggtcgaccgcccttccatgaactagggagccctcaggctgcgatgtttcaggtgggcatgtacaaggtacatccacccgtgcccggttccctgtcagctgaggcccaagccttcctcctccgaacttttgagccagatccccgcctccgagccagtgcccaagagctgctgggagaccccttccttcagccagggaagaggagccgcagcccgggctctcctcggcatactccccggccctcaggcgccccttccggtccttccagtccttcagctgactcagccacacagtctcagacattcccaaggccccaggcaccctctcagcacccacccagccccccaaagcgctgccttagttatggggacaccagtcagctccgtgtgcccgaggagcccgctgccgaggaacccgcgtccccagaagagagttcaggcctgagtctgctgcaccaggagagcaagcgccggcgcatgctggctgcggtgctggaacaggaggtgcccacactagcagagaatctcctggaacaggaacaggactctcgactcagcaagattcatgtggaacttctgcttcgtggccttggggcacaaatccacactcctaaccgccggcagctggcccaggagctgcggaccctgcaagctcagctgcgggcccagagcctgggccctgcgcttttgaaggggccgctcttcgcctttccagacgcggtgaagcagatcctccgcagacgccagatccgcccacactggatgttcgtgttggactcgctgctcagccgtgcagtccgggcggcgctggcggtgctggacgcggagtcggagaagaaagcggtcttaccgaggtcagaagagtcgagtaaagaggagtcccagcagaaacctcaggagagccaggcgctgcagagccagctcccaccagagcagggacccccatcgttgatggtggagttgggccttttgcgagccgagactgacaggcttcgggaccttctggctgagaaggaacgtgagtgccaggcgctggtgcaacaggccctgcatcgggtgcatgcagagaccaggaagtatgccccagcttccgagaccccagccactctcccaaaggaccagaacctggtgcggtggctacaggaactgagtgtagatccagccactatccaaacgctcctgagtcatagcttcacccttcaaaccctgctcacctgtgccactcaagatgatctagtctacaccagaatcaggggagggatggtatgccggatttggagagccatcttggcacagcgagcaggagccacatcggtcaccccagtaccccgggacgctgagtgatgacatcaaaggacacagatacggatggatgaacagagaagacacaaacagctttggacacacctgtcctagaacccaggagcaactacagggaccaggcccaaccccaatgggtggaactaactaggcaggcacccaaaggacactacatacaatcatagactattaaacagaacacttgctacc

SEQ ID NO: 9 - DNA, 3867 bp, Mus musculus
gcggggccatgtcctagggccggggttctagaacgggcgggcagctgctggcaggacccgctggcggaggcgctgagccggggccgctcgtctcctgcggtcacgggtcggggctgcgcgcggagccggcctctcagtgtggtctacgtgctgaccgggagccggggcccggggtggagcccgggtcgggaaccgaggcagagccgctgccgttgcgatgcctgcgcgaagcctgcgctcagctccaggcacacggccacccccgcacgtgcgcagcctaccctttgcgacgtggcgctaggcgacaccgcgctggactccttctacaacgcggatgtagtggtgctggaggtgagcagctccctggcacagccttccttgttctaccacctcggcgtgcgtgagagcttcagcatgaccaacaacgtgctcctctgttcccaggcagagctccctgatctgcaggcccttcgtgaggatgttttccagaagaactcggattgtgttggcagctacacactgattccttatgtggtgacagccactggccgggtcttatgtggcgatgcaggcctcctgaggggcatagccgatgggctagtacaggctggggcgggcactgaagccctcctcactcccctggtgggccggcttgtccgtctgttggaggctacacccacagactcttgcggctatttccgggagaccattcgtcaggatatccggcaggctcgggagcgattcagtgggcagcagctgaggcaggagctggctcgcctgcagcggaggctggacagcgtggagctgctgagccctgacattgtcatgaatctgctgctgtcgtaccgcgatgtccaggactactcggccatcattgagctggtggagacgctgcagcttttgcccacctgtgatgtggctgaacagcacaatgtctgctttcactacacatttgccctcaacaggaggaacaggcctggggaccgggagaaagccctggctgtcctgctgccattggtgaagtatgaaggtcccgtggctccggatctgtactgcatgtgtggtcgtatctacaaggacatgttcttcacttctggcttccaaaatgccgggcacctggagcaggcctatcactggtaccgcaaggcgtttgatgtggagcccagcctgcactcaggcatcaatgcagctgttctcctcattgcagccgggcagcatttcgaagactctgaggagctccggctgattggcatgaagctggcctgcctgctagcccgcaaaggctgtgtagagaagatgcagtactactgggatgtgggattctacctgggagcccagattcttgccaacgaccccatccaggtggtgctggctgcagagcaactgtacaagcttaatgcccccatttggtacttggtctccgtgatggagaccttcctactgtaccagcatttcagacccacaccagagccctcaggaggacccccgcttcgagctcacttctggctccactttctgctacaatcctgccagcctttcaagatggctcctcctcaggaggaccagtgcctggtactggtgctggagataaacaaggtcctgctgcctgccaggcttgagattcagggaacagaccccatgagcgcagtgaccctaagcttgctggagccagagactcaggaggatccttccagctggaccttcccagtcacctccatctgtgggatcagcacctccaagctggaccagcgctgctgcttcctgtacgcacttcctccggcccaggacgtccagctgtgctttcccagtgtggagcgctgccagcggttctgtggcctaattcaggtcttggtgatgaatccagattcctccgcgcccactgaggaggcagaaggcgcaagggaggtgctggagtttgattatgaatactcggagaccggtgagcggctggtgctgggcagaggcacatatggggtggtgtatgccggccgagacaggcacacgagggtacgaatcgccatcaaggagatcccagagagagatagcagattctctcagcctctgcatgaagagatcgctcttcacaaacgacttcgtcataagaatattgtgcgttatctgggctcagccagccagggcggctacctcaagatcttcatggaggaagtgcctggaggcagcctgtcctccttgcttaggtcagtgtggggacccctaaaggacaatgagagcactattagcttctatacacgtcagatcctacaaggactcagctacctccatgagaaccgcatcgttcacagagacatcaagggagacaatgttttgatcaacaccttcagtgggctgctcaagatttctgactttggcacctctaagcggctggcaggcatcacaccgtgcacggagactttcacagggactctgcagtatatggccccggaaatcatcgaccagggcccgcgaggatatgggaaggcagctgacatctggtctctgggctgcactgtaatcgagatggcaacaggtcgaccgcccttccatgaactagggagccctcaggctgcgatgtttcaggtgggcatgtacaaggtacatccacccgtgcccggttccctgtcagctgaggcccaagccttcctcctccgaacttttgagccagatccccgcctccgagccagtgcccaagagctgctgggagaccccttccttcagccagggaagaggagccgcagcccgggctctcctcggcatactccccggccctcaggcgccccttccggtccttccagtccttcagctgactcagccacacagtctcagacattcccaaggccccaggcaccctctcagcacccacccagccccccaaagcgctgccttagttatggggacaccagtcagctccgtgtgcccgaggagcccgctgccgaggaacccgcgtccccagaagagagttcaggcctgagtctgctgcaccaggagagcaagcgccggcgcatgctggctgcggtgctggaacaggaggtgcccacactagcagagaatctcctggaacaggaacaggactctcgactcagcaagattcatgtggaacttctgcttcgtggccttggggcacaaatccacactcctaaccgccggcagctggcccaggagctgcggaccctgcaagctcagctgcgggcccagagcctgggccctgcgcttttgaaggggccgctcttcgcctttccagacgcggtgaagcagatcctccgcagacgccagatccgcccacactggatgttcgtgttggactcgctgctcagccgtgcagtccgggcggcgctggcggtgctggacgcggagtcggagaagaaagcggtcttaccgaggtcagaagagtcgagtaaagaggagtcccagcagaaacctcaggagagccaggcgctgcagagccagctcccaccagagcagggacccccatcgttgatggtggagttgggccttttgcgagccgagactgacaggcttcgggaccttctggctgagaaggaacgtgagtgccaggcgctggtgcaacaggccctgcatcgggtgcatgcagagaccaggaagtatgccccagcttccgagaccccagccactctcccaaaggaccagaacctggtgcggtggctacaggaactgagtgtagatccagccactatccaaacgctcctgagtcatagcttcacccttcaaaccctgctcacctgtgccactcaagatgatctagtctacaccagaatcaggggagggatggtatgccggatttggagagccatcttggcacagcgagcaggagccacatcggtcaccccagtaccccgggacgctgagtga

SEQ ID NO: 10 - DNA, 29105 bp, Homo sapiens
  misc_feature (2150)..(2169): "n" at positions 2150 through 2169 can be any base.
  misc_feature (5556)..(7959): "n" at positions 5556 through 7959 can be any base.
  misc_feature (17084)..(17112): "n" at positions 17084 through 17112 can be any base.
  misc_feature (21770)..(21789): "n" at positions 21770 through 21789 can be any base.
  misc_feature (25555)..(25748): "n" at positions 25555 through 25748 can be any base.
accaccaggcaagatgggccccaagggtgagccaggtgagtaagtggggctggaggcctccccgctttctttgcctctgtccctggactctagggtgggatctctgcttggctgctgtgcctatgatggctctctcacaggggaatggatggctgggaggagtgggaaggattaggagaagggcctggctaccctatgatggccctcctattggggatggagggctgggaggagtggggaggattaggagaagggcctgggtaccctatgaaggccctcctacagggtttggaaggctgggaggagtggagaggattaggagaagggcctgggtaccctatgatggccctcctacagggtatggaaggctgggaggagtgggaaggattcggaaaagggcctgggtaccggctccactggtggctcagcgctggggtgctgagacatcagagccaacactcatcccttctctggggcaggagatccagtgaacctgctccggtgccaggaaggtgaggcagcccttgcaggagccaggaacttgggatcacatggtgttgggtgttggcagacccccaagtgtggccaagatcctccccacagcctcctcagaacccttcttcagggacctgaaggagccaagagggtccctagggtcccacacttgttccagtgcctgggggtgggggtcagggaataacctgggcaccaccccagtccatctcccctttcccaggccccagaaactgccgggagctgttgagccagggcgccaccttgagcggctggtaccatctgtgcctacctgagggcagggccctcccagtcttttgtgacatggacaccgaggggggcggctggctggtgagtgtctgagaaatgggctaacaggccaggcccactggtcacttctcccccttggcccctaggggagccagaacccaccagagcaaggcatttcctagaggaattcactgacaaatgtttagtgagcccccaatgggacctgaagaagtatgagggcttcacagaggaggtgccatttgaaaagaccttaagttgagtgcagtagctcacgcctgtaatcccagctacttgggaggctgaggcaagagaattgcctgaacccaggaggtggaggttgcagtgagccgagttcttgccattgcactccagcctgggtgaaaagagtgaaactctgtctcaaaaaaaaaaaaaaaaaaaaaaaaaatagggtagggaggggcattccagctagaagtaaagataaactcagggaggcagcagagtaaaaggtttgcagggaacgcgtgagtgagctgagagcaggcgtgggtgtcggctaaagtctgccggcactgacggaacatggattgaggacctctgtaaaggccagttcatggaaggcactaaatgatcaacttaagaagtgtgcagcgcgcccagacgcggtggttggctggacgtggtggctcacgcctatgatcccagcactttgggaggccaaggcgggcagatcacctgaggtcaagagttcgagatcagcctggccaacatggtgaaaccccatctttactaaaaatataaaaattagccaggcgtgatggtgggcgcctgtaatccaagttattcaggaggctgagctgggagaattgcttgaaccccggaggtggtggttgcagtgagccaagattgagtcactgcactccagcctgggcaacggagtgagactctgtcttaaaaaaaaaaaaaaaaaagaagagtgtgcagggcaatgggtagccccaggagagttttaagcaggggaggggccaagtagaacttctgttttaaaaagatgattcgggctacaccatgaaagatgcactgcattgggggaccagtggaggcagggacatggtttaggaagacagcaaggagccaggcagtaaagacagtggagcaggcctgacacagtagctcacacctgtaatcccagcaccttttgggaggccgaggtgggtggattgcctgagctcaggagttcaagaccagcctgggcaacatggcaaaaccccatctctactaaaaatacaaaaaattagctgggcgtggtggcaggtgcctgtaatcccagctatgcagaaagctaaggcacgagaattgcttgnnnnnnnnnnnnnnnnnnnnagccgagatcacaccactgtactccagcctggtaacagggggtgagactctatctcaaaaaaataaataaataaaataagacagtggagcaatggaaatagaagtacttaggttgacaactctataggacctcgggcctacttggcttggagggggaggtggaagacatcagggtaaggccaggggtccagcttgggctgtgggagtggcctctctaatgtaaaatatcttggtttttttgtttgtttgtttgttttgagacggagtcttgctctgctgcccaggctggagtgcagtggtgtgatctcggctcactgcaacctccacctcccaggttcaagcagttcttgtgcctcagcctcctgagtagctggaactacaggtgtgagccaccacacccggctaatatttgtatttttagtagagacgggatttcaccatgttggccaggctggtttcaaactcctgacctcaagtgatccacccgcctcggcctcccaaagtgctggaattacaggcatgagccaccaagcgtggccaaatatcttggttcttatagtaaatgaaattgggttattttgactgacacccagcagcgctggccatctcctgtgggtggggacagtgttttgtcaattcagtcttcccagggcttgcaaggctgtggcatgaagttgagtgtcagtaaaagttaacaagggaatgtagagttcatagaaatattcaaagctaacttgaaggatccccattttatcaacaggccccaatccaaagagagagtgggtatccacccacccctcacagttcctgcaccctcagctgccagtgcccagcctggagtaatagctgctgtgccccccctcccccaggtgtttcagaggcgccaggatggttctgtggatttcttccgctcttggtcctcctacagagcaggttttgggaaccaagagtctgaattctggctgggaaatgagaatttgcaccagcttactctccagggtgagttcccagcagggtcctggagtctgggggttactgtctgccatcctgaatccctgccccacccccaagaactgaggattcctccatccctgcctccccttctttccaggtaactgggagctgcgggtagagctggaagactttaatggtaaccgtactttcgcccactatgcgaccttccgcctcctcggtgaggtagaccactaccagctggcactgggcaagttctcagagggcactgcaggtgagtgagcctaaggggagcagaggaaggaggctggatcctttcccagtgctgccactgcccccatgaatgacccagggcaatcctgtctcctctgtgggccttagtttccgcatctgagaaatggcaatcatgaaacaggatggtgcaacagtgaagaatttgggatctggaggcaaacagacctgagtttgaatccatctctgccatttagtacttatgtgaccttgggcaagtcctacccctccactgagcctcagtttcctcctctataaaatgggcagggaggccgggcacggtggctcatgcctgtaaccctagcactctgggaggccgaggcgggcagataacttgaggtcaggagttcaaacccaacctggccaacatggtgaaaccccgtctctactaaaaatacaaaaaaattagccgggcgtggtggagggtgcctgtaatcccagctactcgggaggctgaggcaggagaatcacttaaatctgggaggcagaggttgcagcgagccaagagagtgtcactgcactctagcctgggcgacagagcgagactccatctcagaaaaaaaaaaaaggcggggggagcgcagggaggcaaggaggaagttttgggtgccgcctgaggctctgttgagtgttagtgttctctgctttggaagaggaaccacggaagtcttctttcagagaaacagtgactattggggagagatttaaaagagggaagtggttatgagggagtgcctcagggaaccacctttcctggccaggcacctaagaggttcctcccagcttttcctagcagagttgctcagactggatgggagctgagagaagacaaaggagctagaggggggccggggattctggagggggtaagacagggggaaaagctgggagctttggagccagacagtcccgagttcaagtcctgccgctgcttcaaccagccgagtaaccctgcgcaaacaacctggccccttggtgttgctcgtggggcctgataaaattcaactcttagttgctctgagactcccatggcattatatctccaaaggtgccaggcatggtgctgggcaccaaggtgctttccatcccttccctgctaggggattccctgagcctccacagtgggaggccctttaccacctatgacgctgaccacgattcaagcaacagcaactgtgcagtgattgtccacggtgcctggtggtatgcatcctgttaccgatcaaatctcaatggtcgctatgcagtgtctgaggctgccgcccacaaatatggcattgactgggcctcaggccgtggtgtgggccacccctaccgcagggttcggatgatgcttcgatagggcactctggcagccagtgcccttatctctcctgtacagcttccggatcgtcagccaccttgcctttgccaaccacctctgcttgcctgtccacatttaaaaataaaatcattttagccctttcaagactcttccagttactgggaaaaaaccctagagggcagagcagggacacaagtttcagctccattcagggaagaatttccttccagtcaggaagatggaaaggacagcctctaaagtagtgaggcttctgtctctggaggtgtgcaagacaaggccagaggggcatatagtggaaggactggaggagattcaagcatccattgacaatttcctgaggctctctgggtcctgcaagtggatggctttgtggcaggaattgcacaattgcacagcttttttgtttgtttgtttgtttgtttgtttttgagacgcagtctcgctctgtcgcccaggctggagtgcagtggcaccatcctggctcactgcaagctctgcctcccaggttcacgccattctcctgcctcagcctcccgagtagctggaactacaggcacccgttaccacgcccggcgaattttttgtatttttagtagagacggggtttcatcatgttagccaggatggtctcaatctcctgacctcatgatctgccctcctcggcctcccaaagtgctgggattacaggtgtgagccactgcgcccggccgctttttttttttttttttttttgaaatggagtcttgctctgtcgccctgcccaggctggagtgcaatgnnnnnnnnnnnnnnnnnnnnnnnnnnnnnnnnnnnnnnnnnnnnnnnnnnnnnnnnnnnnnnnnnnnnnnnnnnnnnnnnnnnnnnnnnnnnnnnnnnnnnnnnnnnnnnnnnnnnnnnnnnnnnnnnnnnnnnnnnnnnnnnnnnnnnnnnnnnnnnnnnnnnnnnnnnnnnnnnnnnnnnnnnnnnnnnnnnnnnnnnnnnnnnnnnnnnnnnnnnnnnnnnnnnnnnnnnnnnnnnnnnnnnnnnnnnnnnnnnnnnnnnnnnnnnnnnnnnnnnnnnnnnnnnnnnnnnnnnnnnnnnnnnnnnnnnnnnnnnnnnnnnnnnnnnnnnnnnnnnnnnnnnnnnnnnnnnnnnnnnnnnnnnnnnnnnnnnnnnnnnnnnnnnnnnnnnnnnnnnnnnnnnnnnnnnnnnnnnnnnnnnnnnnnnnnnnnnnnnnnnnnnnnnnnnnnnnnnnnnnnnnnnnnnnnnnnnnnnnnnnnnnnnnnnnnnnnnnnnnnnnnnnnnnnnnnnnnnnnnnnnnnnnnnnnnnnnnnnnnnnnnnnnnnnnnnnnnnnnnnnnnnnnnnnnnnnnnnnnnnnnnnnnnnnnnnnnnnnnnnnnnnnnnnnnnnnnnnnnnnnnnnnnnnnnnnnnnnnnnnnnnnnnnnnnnnnnnnnnnnnnnnnnnnnnnnnnnnnnnnnnnnnnnnnnnnnnnnnnnnnnnnnnnnnnnnnnnnnnnnnnnnnnnnnnnnnnnnnnnnnnnnnnnnnnnnnnnnnnnnnnnnnnnnnnnnnnnnnnnnnnnnnnnnnnnnnnnnnnnnnnnnnnnnnnnnnnnnnnnnnnnnnnnnnnnnnnnnnnnnnnnnnnnnnnnnnnnnnnnnnnnnnnnnnnnnnnnnnnnnnnnnnnnnnnnnnnnnnnnnnnnnnnnnnnnnnnnnnnnnnnnnnnnnnnnnnnnnnnnnnnnnnnnnnnnnnnnnnnnnnnnnnnnnnnnnnnnnnnnnnnnnnnnnnnnnnnnnnnnnnnnnnnnnnnnnnnnnnnnnnnnnnnnnnnnnnnnnnnnnnnnnnnnnnnnnnnnnnnnnnnnnnnnnnnnnnnnnnnnnnnnnnnnnnnnnnnnnnnnnnnnnnnnnnnnnnnnnnnnnnnnnnnnnnnnnnnnnnnnnnnnnnnnnnnnnnnnnnnnnnnnnnnnnnnnnnnnnnnnnnnnnnnnnnnnnnnnnnnnnnnnnnnnnnnnnnnnnnnnnnnnnnnnnnnnnnnnnnnnnnnnnnnnnnnnnnnnnnnnnnnnnnnnnnnnnnnnnnnnnnnnnnnnnnnnnnnnnnnnnnnnnnnnnnnnnnnnnnnnnnnnnnnnnnnnnnnnnnnnnnnnnnnnnnnnnnnnnnnnnnnnnnnnnnnnnnnnnnnnnnnnnnnnnnnnnnnnnnnnnnnnnnnnnnnnnnnnnnnnnnnnnnnnnnnnnnnnnnnnnnnnnnnnnnnnnnnnnnnnnnnnnnnnnnnnnnnnnnnnnnnnnnnnnnnnnnnnnnnnnnnnnnnnnnnnnnnnnnnnnnnnnnnnnnnnnnnnnnnnnnnnnnnnnnnnnnnnnnnnnnnnnnnnnnnnnnnnnnnnnnnnnnnnnnnnnnnnnnnnnnnnnnnnnnnnnnnnnnnnnnnnnnnnnnnnnnnnnnnnnnnnnnnnnnnnnnnnnnnnnnnnnnnnnnnnnnnnnnnnnnnnnnnnnnnnnnnnnnnnnnnnnnnnnnnnnnnnnnnnnnnnnnnnnnnnnnnnnnnnnnnnnnnnnnnnnnnnnnnnnnnnnnnnnnnnnnnnnnnnnnnnnnnnnnnnnnnnnnnnnnnnnnnnnnnnnnnnnnnnnnnnnnnnnnnnnnnnnnnnnnnnnnnnnnnnnnnnnnnnnnnnnnnnnnnnnnnnnnnnnnnnnnnnnnnnnnnnnnnnnnnnnnnnnnnnnnnnnnnnnnnnnnnnnnnnnnnnnnnnnnnnnnnnnnnnnnnnnnnnnnnnnnnnnnnnnnnnnnnnnnnnnnnnnnnnnnnnnnnnnnnnnnnnnnnnnnnnnnnnnnnnnnnnnnnnnnnnnnnnnnnnnnnnnnnnnnnnnnnnnnnnnnnnnnnnnnnnnnnnnnnnnnnnnnnnnnnnnnnnnnnnnnnnnnnnnnnnnnnnnnnnnnnnnnnnnnnnnnnnnnnnnnnnnnnnnnnnnnnnnnnnnnnnnnnnnnnnnnnnnnnnnnnnnnnnnnnnnnnnnnnnnnnnnnnnnnnnnnnnnnnnnnnnnnnnnnnnnnnnnnnnnnnnnnnnnnnnnnnnnnnnnnnnnnnnnnnnnnnnnnnnnnnnnnnnnnnnnnnnnnnnnnnnnnnnnnnnnnnnnnnnnnnnnnnnnnnnnnnnnnnnnnnnnnnnnnnnnnnnnnnnnnnnnnnnnnnnnnnnnnnnnnnnnnnnnnnnnnnnnnnnnnccccgcagctgcgcagcctgcccttcgggacgctggagctaggcgacaccgcggctctggatgccttctacaacgcgggtgagagcgctgggggcggggccggatccgggcgggactcagggtcctgggaggggaccaagccgggctcgaaggctcaagggaggggccgagaggggtaccgggtctaggggacttaaagtgagctaaagctgaagggcttgggacagggcccgtgaaaaaagtgggatttaggggatctggggcgcggccgggctcgggacgagacagggatccgggcgcggctctagggctcgaggttggggcttaggcacccttcagtcggagcggtgcccagccagcggggcaaggatggggaggggctttggaactctggggcggggcggggagcggcgcggggctgtggtgtctcaggggtggggttggagaactcagcctcaccctcaggagaatgtcacgcggatctcttgaggacaattactgggagaggagcttggacttagggaaaggggccgggaggctggagttcaggagtcctagcatactatttccaaggatcgggctaggagaggcaaaaagagaagcgaaggggcccgacgggactggatactgggtgagggagcttaggttaagtggcctcagcggcccagaaagaatgggcggggaaggggcggggaagtgggcgggaaaggatggctcaggggcggggccagaaggaggctattcccccgcgagtcactcctccctccagccagcccggatgctcggcccccatacttacttgcttatgctagagtccagtagctgtgcttcctggatgtccatgaaatcgtagcctaaaatgaaggctgacccgaccactcggacacaaagatacaattatcgacagacacaaatcgcatacatgttgactcatgcaggccctagcagacgctgtcacacacacagatacagtcagacatagtaagctatacatgtcacagatatacacatacatacatttaggcacagcgttgtctatgcacactgatggtagcccctttcaagagcctgtgctgaagaccaaagggaggggacttctatgtttgcgcaactcccacctcctaaatggcccgtaacagactcaactggtccacagcctcccttcccccatgccaggtgctcacaggctctgaaccgtggcctgagggtcccaacccagtgagcccaactcctctcctgcaacactacagagatcagttctgtgaaagtgccaggggaaccctaaaaagggccgactgaagcccaaagcagaaccagaccctactggagtcccacagcaaggcaggtcaagccaggatggaccccggctccttccccatcaagctgggcttcagggatcagcgccaccccctctgtgcctgcagatgtggtggtgctggaggtgagcagctcgctggtacagccctccctgttctaccaccttggtgtgcgtgagagcttcagcatgaccaacaatgtgctcctctgctcccaggccgacctccctgacctgcaggccctgcgggtaggtggcctggggctggtggaggcaggcacagggctggggtaaggcctacacagaacaccagtatctgactgtctgcctcctgcaggaggatgttttccagaagaactcggtgagcagaatccacctctcactcaaaagtgccctttgacttccgctatgacctctgacctccactaatccccctggcctcctcagtcacctaaccccccactgacatcccaagtattcctctgtttcctgttgcctcctctcatgacgggtgcccctttcctgcgattccaattcccactgatgctgacctttgatgctctcactccccttgtctagccctgtgctgacctctgacctcactgattcctgcctccctcccaccaggattgcgttggcagctacacactgatcccctatgtggtgacggccactggtcgggtgctgtgtggtgatgcaggccttctgcggggcctggctgatgggctggtacaggctggagtggggaccgaggccctgctcactcccctggtgggccggcttgcccgcctgctggaggccacacccacagactcttggtaatgaaggcccccagggagggtgctccaggagggggctggtgagggtacggtgggctggggctgaggtacaggccccaccattctctctccctgcctcccctaccctgggcatcagtggctatttccgggagaccattcggcgggacatccggcaggcgcgggagcggttcagtgggccacagctgcggcaggagctggctcgcctgcagcggagactggacagcgtggagctgctgagccccgacatcatcatgaacttgctgctctcctaccgcgatgtgcaggtgcgtggtgttcagagaggcagtagggcagctggcatttgaggtcaggcaaacccaagttcagttcctggctgggccacttgctcactggtggctttgggcaaattatcaaatgtctctgagtgttggcctccttatttgttagagaggatgagcatgtcgctgcctcctggggcagttgtggggttgggaacgcccagcatggggcatacagtaggttctccctgtgaggtgtgtccgctgggcctgagggaggcgtgcagaagatggtggctgggtgggatgtcaggagtgggacaggaccctggctcaaggttccttggggcctggaggcccatgatgccagtgcttgccgttccctgatgcaggactactcggccatcattgagctggtggagacgctgcaggccttgcccacctgtgatgtggccgagcagcataatgtctgcttccactacacttttgccctcaaccggtgagtggcagagcaagggttaggtcatagccacataaaggtttccgaaacctaggtctctgcgtgcaaagccattgctgtctgggatcactgctgttcggggaatttgctgaccggggtcactgatgtcaataggtccctgttgttctgagttactgctgcctgggtcggggtgggggaggtggtgctgcctgtggtatggtcaccgctgtccaagatcactgctcctaagagtcatcgcatctaggaatcacttccatctgaggtcactagagaggtcagtgctggccagggtcattatcattttgaggtcattattgtcaggcccctggaagggtccctgctggttcagtgtctagaggtccctggacagagtaggccagggccatcagggagggcctgagcccatcttttccctaggaggaacaggcctggggaccgggcgaaggccctgtctgtgctgctgccgctggtacagcttgagggctctgtggcgcccgatctgtactgcatgtgtggccgtatctacaaggacatgttcttcagctcgggtttccaggatgctgggcaccgggagcaggcctatcactggtaaagagcacagtgagtggccggtgggctaagctgtgagatgaggggtggtgctgtgggcatcagtccagccctgtgccccctacccccaccccaggtatcgcaaggcttttgacgtagagcccagccttcactcaggcatcaatgcagctgtgctcctcattgctgccgggcagcactttgaggattccaaagagctccggctaataggtgagcacagatcctggctcttgtctcgtcacccacaggggttccgaggggcctgggaagagggcagggagagagcacactgggcaagagctaggatgagctcatccattttggactgtcctgcccatacccacacctgggtcctcatacctgttctgggccctcaggagccctcaaacccacaaatgttcccaaactcacatctgcgtgtccattacatcctgaattccacatatacctgtgcctgagctcctgttcccacccgagatcttgccatactcaatgccatactcatatctatgttcatgtccacactcgggcccacagaaatggtgggcctcactcacccctgcacccacactcactggagcccatgcctctctcccccaggcatgaagctgggctgcctgctggcccgcaaaggctgcgtggagaagatgcagtattactgggatgtgggtttctacctgggagcccagatcctcgccaatgaccccacccaggtggtgctggctgcagagcagctgtataagctcaatgcccccatatggtaggtggccccctctgcattcttggcctgacctgggctgtcagctcctgcacctatgtccattggcatgctagactgaaccctgagccaatgacctggctgcttttagaccagtgcccgtggcaccccatgccaacgttctagctatatccaggccagtttcctctccctggcagtgctggttggtgcctgggctgaactgaggatgtggctttgcatgcaggtacctggtgtccgtgatggagaccttcctgctctaccagcacttcaggcccacgccagagccccctggagggccaccacgccgtgcccacttctggctccacttcttgctacagtcctgccaaccattcaagacagcctgtgcccagggcgaccagtgcttggtgaggcctgtaggggtggtggacccgggaaaggggtaagccccttctgactgaccccactccccaactgcctgcaggtgctggtcctggagatgaacaaggtgctgctgcctgcaaagctcgaggttcggggtactgacccagtaagcacagtgaccctgagcctgctggagcctgagacccaggtgaagtcgctgctgaggcccctcactcacctttgctaggaccttttctgtggagcctttctcccatcctcagacccctctcctgtcaccagcactccccatcacaccccatttcttcttgcaggacattccctccagctggaccttcccagtcgcctccatatgcggagtcaggtgataggcgggacctggggtgactggaaagacgggaggtgagggtcgctgccacccagcctgacgcttactgggttcttcatcccttcccagcgcctcaaagcgcgacgagcgctgctgcttcctctatgcactccccccggctcaggacgtccagctgtgcttccccagcgtagggcactgccagtggtgcgcagcctttcatggtcggggtactctgagggccaggatgcccgggggggagtgggggaaagaaagggacgacgtccgttggatgctccggcttaggtggggaccaagatgcccctcccgcgggtctgacctcccccaccttcaggttctgcggcctgatccaggcctgggtgacgaacccggattccacggcgcccgcggaggaggcggagggcgcgggggagatgttggaggtgaggacgcgggactgggagctcgcggagggcgaggggccgcgggccctgctgaactcccatctcaccccgcgcccggcagtttgattatgagtacacggagacgggcgagcggctggtgctgggcaagggcacgtatggggtggtgtacgcgggccgcgatcgccacacgagggtgcgcatcgccatcaaggagatcccggagcgggacagcaggtgcggtgcgtggcagcgcgggtggggctgagggctcgcgagggccgagtgagccgggccacgagcggagcggctcctgtgggcggggcctagtgggcgggctcgtaggacctgagagttcgagccctgtggactgggcccgtgggcggaacagccaggaccgtgcgggcgggattgaggtctggagggtcctgtgggcagggtagtaagggtggggaaggtcggagagggcttgtgggcggggcgggtccttggggcggggccaggctggcgtgggatgggcggggcttctctgcccacctcggtccctttcctctctcccttacctcccctcaggttctctcagcccctgcatgaagagatcgctcttcacagacgcctgcgccacaagaacatagtgcgctatctgggctcagctagccagggcggctaccttaagatcttcatggaggaagtgcctggaggtacctgccctgtgtgggatgggaatgaaaccgaggtgtgaagcatgggaccgaggcaggcaggggtagagagccctagggggaaatgcaccctagtgcgtgtgggtggtgtagcctagaattagctgaggagtggcgctgggtgatggagttgggctacaacatgggtgtgtctgggccttgagcagagagatgtgggctggagccagtgggtgggaagaatgaacttggactgtccccacccaggcagcctgtcctccttgctgcggtcggtgtggggacccctgaaggacaacgagagcaccatcagtttctacacccgccagatcctgcagggacttggctacttgcacgacaaccacatcgtgcacagggacataaaagtaagccctggggctggcccgccctcatctgctgagggtggcggggaaggaaacatggtcccagacgcaggctggcagtttagattaagtgagcagacctgttgcaaagggtagggaattcatcagggaggctccttagagaaggaggggaaaggttcagctctgaagccaaaccaattgtcagctcccagaggggcatataagtgggatggcaaggggagagtgttgacagaggcaggaccaggctgggatctccaggagatgggatcccagaaagagggtctagttctgctggcaggggcccagaccagtgtccactaatggctgtcaatcagggggacaatgtgctgatcaacaccttcagtgggctgctcaagatttctgacttcggcacctccaagcggctggcaggcatcacaccttgcactgagaccttcacaggtaacaaggtgtgggggtggtgagtggggatgctgacctggggcagaagatctcttggaactttccagggaagggggtttctcctaggcatggagttagagtcctaatggggaatgaaacccagggtgagtgattgggccagggctgaggtggtggcatctggaactggagcttggagaagtgatgaaattgactttagcacttgaggagtgttgatgcaggccaaggtgggagttggaggaaaaagcaggtgatggagttcagggggacgaggcaatccaggatgtgtgctggagcactactgtgggtgatggagtctgtgaatgtggtggagcccaggatgaatgacggaagccttggcaggcgatggagcccagggtggtgatggaactcaggatagatgtttgatgaccaggataggtgttgaggtatattttggatgataggttcagtatgggtgcagtcggcctgaggatgacggcattcccctccctgctccaaccccatgatgaagcctagatgggcattggtgctcctgtttctgtcctaggaactctgcagtatatggccccagaaatcattgaccagggcccacgcgggtatgggaaagcagctgacatctggtcactgggctgcactgtcattgagatggccacaggtcgcccccccttccacgagctcgggagcccacaggctgccatgtttcaggtgagacctctttgggcctggcccatggaagtggcatagggccagcctgggccttggacacctctgaatgtcacccttgttcaccctccccccacaggtgggtatgtacaaggtccatccgccaatgcccagctctctgtcggccgaggcccaagcctttctcctccgaacttttgagccagacccccgcctccgagccagcgcccagacactgctgggggaccccttcctgcagcctgggaaaaggagccgcagccccagctccccacgacatgctccacggccctcaggtgcttgcgggtggcgggatgggcacagtggagggcagaggagttgtggagctgtgagggtggaggagagcccagctgatggctctgtccctccctcagatgccccttctgccagtcccactccttcagccaactcaaccacccagtctcagacattcccgtgccctcaggcaccctctcagcacccacccagccccccgaagcgctgcctcagttatgggggcaccagccagctccggtgagaccaaggctcctgggatgggttccttttgcctggttttgcctttttctcctctcctacaaaagccctccctggggacctgggcaccttgaccacttgtgaatgtggcatttggtgcctccccatgccctgttctggcaactctaacttggacttgttgtgtcctctcagtgcggggtttatctatgttcatgcctgtgaggtaggcataaaagtaggagagccaggattcaaacccggcaacagaggtgactggccggttgctgcccgtcctcaatcagcagctcgcccttgtgcccagggtgcccgaggagcctgcggccgaggagcctgcgtctccggaggagagttcggggctgagcctgctgcaccaggagagcaagcgtcgggccatgctggccgcagtattggagcaggagctgccagcgctggcggagaatctgcaccaggagcagaagcaagagcaggtgggcggcccactctagcgccccctggtggtcgcaaagggtcaggacacctgttgatgtccccgccccctacctccgcggcagcgtctcttttggctggagcactcgctgacaacccctctcttccttctcagggggcccgtctgggcagaaaccatgtggaagagctgctgcgctgcctcggggcacacatccacactcccaaccgccggcagctcgcccaggagctgcgggcgctgcaaggacggctgagggcccagggccttgggcctgcgcttctgcacagaccgctgtttgccttcccggatgcggtgagggcgccttctggtagttagagctgcccaacaacaggtagtgagttccccgtgcctggtgaggtgccaggacttgacgttcccagattccctgtctcctctgtgaagatcaggcctgcagcaaaaaaccgtctgcccagtcctagcttcccaggccttccctggacctcaagccctgcccaccnnnnnnnnnnnnnnnnnnnnnnnnnnnnnccctgcctctagttgaggctcagctgtctcagcggcgcctccctccccctgcaggtgaagcagatcctccgcaagcgccagatccgtccacactgggatgttcgttctggactcactgctcagccgtgctgtgcgggcagccctgggtgtgctaggaccgggtaggaggggaatgccacgggcctcctgccagcgagggtgtggtgcttgctgggcgcggtgaacatcgaatggggccggtgggggccaggcgggacaggggcaggcaggcgccggtgggggcgtgactaaatggacatctcccataccggcaccgcctggggcctgcccagagccgggcaccctaccccccgcactttggggtctggggttcccaaacgggcgttgtagccttgcctgagttcaccgcactgggctgcagaggtggagaaggaggcggtctcaccgaggtcagaggagctgagtaatgaaggggactcccagcagagcccaggccagcagagcccgcttccggtggagcccgagcagggccccgctcctctgatggtgcagctgagcctcttgagggcagagactgatcggtaaagccccttggaatcgctcatagcctctgccgggcttcaacccactcaccactcaccgctccattctactcttctgcgccccacaggctgcgcgaaatcctggcggggaaggaacgggagtaccaggccctggtgcagcgggctctacagcggctgaatgaggaagcccggacctatgtcctggccccagagcctccaagtgagtgggccttggctggagaacattattggtgggttcaaggcagcttctagcacaaggcacccttgggctcatcacctgacttgggctcatcacctgagcgggccttggcgggagaacattattggtgggttcgaggcagcttctagcacaaggcacccttgggctcatcacctgacttgggctcatcacctgagtgggccttggctggagaacactattggtgggttcgaggcagcttctagcaggaggcactcttgggctcatcacctgactgcttcttgacagctgctctttcaacggaccagggcctggtgcagtggctacaggaactgaatgtggattcaggcaccatccaaatggtgagtcggggagtgcttggctatccctgacctcaccagccaaagcctccatctctgtccatcttcctgctcttctactgtgccctctgatgcagagaatctcactaccagaagaacacttagtattctcgtcccattgtatggatgagaaaactgaggcccagaagggtgtgatctgcctcattattttggcaacagagcagagctagtacctgggtctcgacacatctttctgtaatttcttatttccctctttctgcgggtctttgaccacatccagctgttgaaccatagcttcaccctccacactctgctcacctatgccactcgagatgacctcatctacacccgcatcaggtacatcctgggccccccaagtgtgaaccatgcatatggcctcatcctggccaactgcaggcctgcctaggttccttcctggaaaccaaaggggcacctgggtcccctagggacagagggggcactgggcagacagtgtgtgcaagatagagtccagggccaccttctggctgagccacactgagtccattacccccaggggagggatggtatgccgcatctggagggccatcttggcacagcgagcaggatccacaccagtcacctctggaccctgagagctgaatgagggcatcataggccagacaggccccaaggatggatgaatggagaggacaaaggcagcttctgacacaccagccccaggacctggggcgactggaggaagccaggcgagtggggcccaggactggttccagtgagagaaaccaaccacaggcacccaagcactaccagacaaagcgtattaaacagaacacttttgaacctttgtcctggcaattttggaggtgtatggtgggaggggtatcctgggaagagccccctaggtcttttttaaaaaattttttttgttggccgggcatggtggctcatgcctgtaatcccagcactttgggaggccaaggtgggcagatcacgaggtcaggagatcaagactatcctggctaacatgctgaaaccctgtctctactaaaaatacaaaaaaattagctgggtgtgctggcgggcacctgtagtcccagctactcgggaggctgaggcaggagaatggtgtgaacctgcgaggcggagcttgcagtgagccgagattgcgccactgcactccagcctgggcaacagagcgagactttgtctcaaaaaaaataaataaataaatgaaaaaaaaatgtttttaggccgggtgcggtggctcatgcctgtaatccccgcactttgggaggccgaggtgggtggatcatgaggtcaggagttcgagaagagcctgaccaacatggtgaaacctcgtctctactaaaaatgcaaaaattagctaggcgtggtggtgcgtgcctataatcccagctactcaggtggctgaggcaggagaatcgcttgaacccaggaggcagaggttgcagtgagccgagatcgcgccattgcactccagagcgagactccgtctcaaaaaaaaaaaaaaaaaaaaccttttttagagacaaggtcttactctgtcatccaggctggagtgcagtggcatagtcatattcactgcagcctcaagcttctggattcaagcgatccttcctcctcagcctcctgagtagctgggaccacagctgtgcaccacccacacccacctaatttttaaacttttttttttgtagaaatagcatctcgctttgtggcatagctcactgcagccttgaactcctgggcacaagcaatctgcctgcctcagcctcctgagtagctgggactacaggcatgtgacaccaccacctgcagctaatttttaaaattttgtcgagatggggtctcattatgttgctcagactggtcttgaactcttgggctaaagcaatccttctgcctcagcctcccaaagcattgggattacaggcgtgaaccactgtgcctggtttctactgaagtctttgtggcagagtctgaagttccttaatctggcccctcttacttccctggctctttcctacaatcacctttcttcctccctgccccagcagacaccagccttttattgctcttagaatagactttattgactttagccaagggcaggccctgagatgggggtccagagagagaggcttggtggggctacgtcctgggggccaggttggttctgaggggtagaaggccatccacccactcgcacggctgctccaggagggcttgccacagctgcttctcctcaggtgtggaatccatccagggcacctgcagcccatagctgctgcctggatgtgggtgggcaggggttgagggcatgatcacactggacaccttggggcccccaaacacctgcctggtcccagattatgcactgtcccccgttaccaccctcagttctcagtagatatcaaagctcaggaaaggacagagaggtatccagggccacacactgagcccccatctcccagggcctgtcccagggcctgtctcagggtgctgtcccacttaccggtgcccaggctgaggcgtgtgccccccagctggcggttggccagggccccatggtcccagagggagagctcggcacaagcctggcgcaggtcagcaggcccaaagccatcgtacaccatggtgtgattgaacacagggctgaggctgcgtcgcacaacccttgtacgctggcggctggcccggctgtcatcaggcagcacgaagctgtgcgggaggtggcctggcatcaggtgacccccctcacactccctagagtcatccagtcaccacgtcccactcattctccctcacatatgtccatgtcccctggctcctgcctgcctggccttagaccctcactgccctgggacctttgcaccagcctcctctcaggtctcctggctttaaaagttacagctcctggccgggcgaggttgctcacgcctgtaatcccagcactttgggaggccgaggtgggtggatcacctgaggtcagaagttcgagaccagcctggccaacatggtgaaaccccatctctactaaaaatacaaaaattagctgggcatggtggcatgcacctgtaatcccagctacttgggaggctgaggcaggagaatcgttggagcccaggagactgcggctgcagtgagctgaaatcacaccactgcactccagcctaggcaacagagtgagactgcatcttaaaaaaattaataatagccgggcgcggtggctcatgcctgtaatcccagcactttgggaggccgaggcgggcggatcacgaggtcaggagattgagaccatcctggttaacatggtgaaaccccgtctctactaaaaatacaaaaaaattagctgggcgtggtagcgggcgcctgtagtcccagctactcaggaggctgaggcaggagaatggtgtgaacccaggaggcggagcttgcagtgcaccaagatggggccactgcactccagcctgggcaacagagcgagannnnnnnnnnnnnnnnnnnnaataataatgttacaactcctattcacagggactgcagagcaatgtctctgaaatgcagttctgctattctcgctggctcagtgacttttattatctccctgttgctccaccaccacccctcctcaagcagtttccaaggtttttttttattttttgagatcgagtctcgctctgttttgcccaggttggagtgcagtggcgtgatcttggttcactgcaaccttctgggttcgagtgattctcccgcctcagtctctcaagtagctgggattacaggcacccaccaccacgcccggataatttcttgtacttttgatagagatggggtttcaccatgttggtcaggctggtctcaaactcctgacctcaggtgatccacccgcctcagcctcttaaagtgctgggattacaggcataagccaccgtgcctggcctgtttccaaggttttcaaagcctgggaaccccctctgcaaaatacagtgttgctcagaagtacagtacctctgtactgcagcctctggctgcatcagagtggacacccagaagtgacccgcccacctccatttcactctctaacagtgggggcagcacctggaggcacccctagaagtcccctagaagcttacactgaactataagttcccagccaagccccacagcctggcctcccaggttctctatggaaggacccttgcagccctcagcctcagcttttcaacaagtcctataggcgccagtcacgctgaaatgcagctcctcaaaggtgtcctcaacttccctgactccaggcctttgctcaaaccgtccccttcacccctgctcagtggtgaaagcccaggctgcgtgatcaaaggttgattagtaagggtttgtggaggttgggcactccactgcaggcaaaagaatgggaagcccggagggccagcactcctcaccattgtacgtaagtgtccagggatcctgcccgcagcggcaggaggtcccgagcctccttcacccagaagtgcagctccccgctcgggggcagtcctgcgcctgcggagaggctcggctcaggcccgcacacggatggagtccaccgcccccaaacccggggactggagtctcccgcttttcagggcgtgtccagcttggcctctccggctgtcactcaccctcggagccggcggggacgtacttgagggacagggcgagtaacccgcggctcggaaggtcgtcgggagagggtgggacctgcgagaggcgggcttatcgtggagcaggggctaatggaaaggggcctcaggagggtggggtctgcagacccggatggggtgcggctagaagagacggcggggcctgcaggggcagaacctaggggtcctagcgccctcggggaaggggccgtggccggccgggcttcgcctggggccatgaggttaagaggttgaggggaggttctgtcgaaggcggggtgtgagggggctgcgggagagcctggtggggtaaatgcaggagacccgggccgcaggtctccccacgcggcctggctgcctcacccggggctgcagggggagccaggtgggctcagagccccagtcccacgtgtccaggggcacttcaacttcgcccagaaagatgttgcgacccaggctttcgcggtgccacacagacaggctcagcacgcggccctgaagctcggcctgcgggacggagtactgaggacaggaggtgagctttagtggagcactgctggtggcccgcgtagatgctgcgcgagttggctgaggcaggtcctaccgcgttcctaccatgatggaattctggggagcccctaagggcattaatggggacctgcactatcaccacgcccaccacgaggctgacaacactggataacgagttaatgggccccctccgccgatcctccgggcaatgacgttactggctgcccttgccacctagccccgcaggaagggggcgtccagttcattaacggggaaccgcatcgtggtcacagcctcacccggagagtctcgttgaaaaccggattcagattccgtttcttcaccgccgtcttgcgcttgctctgcttatccgggaggaggtagcttttgacgtagctggggaggtgagaacccgaggtgaggaggggccctcccagagccttctcccctgcctgtgggctcccccagccaccatcccgaacacgtgccaggcctcgtgctaagcgctttacagggattgtctcgcttaatcgcacgcctcccaataacgctgttgttcccattttgaagatgaggacgaggaggccgagaccctgtgaatggtgggctgggctgtgacagccgcgccccgcttggccggcggggcactcacgggtccgagcggcggcgccgggcggcggccaggccctggcactggatcacgtgcacgcgcagctcggcggcgcccggctcgtagtgcagcgcgaagtgcacggagccgcggacctgcaccgcctccgcgtcgcctgacaggctcatctggctgccgctcagctgcggacgggagtgggtgggagtcagggccgctcgcagggctcacgtcggggccgcgggcagcgcggaggcttcagacccgggtcataggtggcaggctggggggctgcagcggtgggtcccgcggcgagggaggggcaggcaggggctacgcatcggaacgggtccaccccccggccgcccgggtcccctccctcccgcctcaccgtggaggagttaaggctggacaccgaggagctgctgctgagcatgcggtcgagagaggggtcgggccccggggcctcctccccattctccaggatctgggacgcggccttggtctgcagagggggcaagtgacggggcgccccttctttccccacccctgccccgagcgccctgggtcgcgggcggctcgcagccctgggcaggagcgctccccgcccggagtccgctccggatgttgagagcagccacgggccactcccgcctacctgggcttgctggggccgcggctcctgctctccccccgacgcgggctccagctccgggtcagcctcctcggcacagacctgttggtctccttggccaggatctggggtggggcacgagatgctaagcgagccctctcctgccctcccctaagcaaatttgtaggaactggtttacaaccccagcgagctgcagattcaggccccggtgctgccctgggatcgtccccacctccgacgcggggtgggagtgggggtgacgagggtgaacacaggtggttggggccccttagagctgcctctgacccgcgaaacctctccgtgctccccaacaggcgctcccactcaccttcctgggcctgggacgcctcctcaggatctgaagcctttagggggacagaaggcgatgggaaatcaggtccctgaaggaagaaaggggtagaggtcacagtacgggggctggtgaggaagaggtcaaaggtcatattggggtcagaggtcatagggctccagccagctaccccagtttcaggtttagggcagccctccgggcagggctggcagccagctgcaggagcggtgagaccagtgcttcacagcccaccccgcagggcttgtgccgcctgactccctactcccattggtggggtcattcgtacctgagtcctccacctccgccaggccaggccagtcccattcctttctcactcctttttttatttttattttttatattgacccattggtagacaaccttttttgcttttttttaatnnnnnnnnnnnnnnnnnnnnnnnnnnnnnnnnnnnnnnnnnnnnnnnnnnnnnnnnnnnnnnnnnnnnnnnnnnnnnnnnnnnnnnnnnnnnnnnnnnnnnnnnnnnnnnnnnnnnnnnnnnnnnnnnnnnnnnnnnnnnnnnnnnnnnnnnnnnnnnnnnnnnnnnnnnnnnnnnnnnnnnnnnnnnnnnnnnttcaagcgattctcctgcctcagcctcccagtagctgagattccaggttatgcaccatcatgcccagctaattttgtatttttagtagagatggggtttctccatgttagtcaggctggtcttgagctcctgacctcaggtgatctcggcttcccaaagtgctgggattataggcgtgagctgccacgaccggccttttttttttatttattttttatagacatggggggcattttgctatgttgcccaggctggtcttgaactcctcggctcaagcgatcctcccacatcagcctcccaaaatgctgggattacaggcatgagccaccgtgcctggccccacttcaccccttaatagccagattcagaagttcccttagaggctgggtccatataccactcactgttcaccaccgttcaccactgtttaccaccattcaccaccgttccccaccgttcaccactgttccacccaggaggtgatgaggtgcagacacaggaaggaacatttccagggtctccccattcccaggctggggctctttcccccctgccccctgcacattccacctcccctccagggacactgtactcacatgttggctcattcacttacctcagtctccctgagcctctcctgaggggcctcatcaatggtgagcctaggagtagggagaggacgctctcagagggagggaccctggtgactggtgggcaccatctcccccttcctgagactcctcctcacctgggctctggcccctcttccttctctttcacagcagcctcagcctccctgtcgtggcctggagcctggtctcctgggcgcaggtgagaagttctgtgagcccccatgctcaggaagcctggctgtgactcgggagaggccctgggagatacccacccaccccatgcccacggaggggcattgcccactgaaagacacacagtactgggggcagccaggactggagccctagtggtcctctctccctgtccacatacagccagcgccctggacggcacatggcttgccctgccccgaggatctcctctcacccctggtgctcttcttcctgcgcatagacgctcggacaaggtcagagccgaagtgggcattgtggtgccgctgggagcgtgcttcctggaaccagtcccctgtcaggatcttcagctgcccagggtctgccactgaggcccggagcttgctggaggaagggggagggtgtggctgtcatgactcacccaagcaacattcccgccacctacattgttaacaggcttgggaccaggggccagggacccaacagcaaatcagacttgatctgtgctgtggaggagctcgggctgctggggagaccaagtccagaagagacaagtacactgtagtgaggtggatgatgtgatagaagtaagaagagccagctctgcctgtgagaatccaggagggcttcccagaggaggtgacatttgaattgcctttatttatttatttacttaattattttgagatggagtctccctgctatgcccaggctggagtgctgtggcgcaatctcagctcactgcaaccttcaccttccaggctcaagtgatcctcccacctcagcctcctgtgtagctgggactacaggcgtgtgccaccatgcccagctaattttttatatatttttttgtagagacggggcttttccatgttgcccaggctggtctctaactcctggactcaagcaatccacctgcctcagcctcccacaatgttgtaagtcactgtgcccagccttgaatttcttcttaaaagacaaattggaactctccaggtagagaaggataataattattatacttttaattttattatttttttttgagacagggtcttgctctgttgcccgggctggagtgcagtggcatgatcatggctcattgcagcctgacctcctgggttcaagcaatcctctcacctcagctgcctaaatagctgggactacaggcgcacaccaccacgccaggctaattttttatattttgtaggaatggggtctcactgtgttgtccaggctggtcttgaattcctgggctcaagcaatcctcccgtctcagcctctcaaagtgctaggattacaggcgttgccactatctctggccaattcctcttaaatcagtgaagtaggactccttagccccattttacagacgacgagcatggtgctcaaggaggtcaggtgagttgccaaggctacgtagctaggaagtgtctgtccccaaacattgcttgtaacgcccatgctcttctacaactgtgctcttccaggaagaagtaccagcataggcatagaagtgaagagtgggttcagggactggggagcacctgagtggctggaggggtcactttgtgtctgtgtgtcgggtcggagttatggtgaaagaggagatggtgggggctggcaaggaccgaccagggaggcccagtggaccatgcctaggagcttgcccttgatactggggagccaggggaagttttcagcggggatattaaggacggatctggccaggcacggtggctcgcgtctgtaatcccagcactttgggaggctgaggcgggtggatcatctgagatcagaggttcaagaccagcttggccaacatggcgaaaacccatctctactaaaaatacaaaaattagctgggcatggtggcatgtgcctataatcccagctatttgggaggctgtggcaggagaatcgcttgaacccggaggggtggaggttgcagtgagccaagattgtgccacttcactccagcctgggcgaaaaaatgaaactctgtctcaagaaaaaaaaaaaaaagcagacagatctggggagcaccagctgcaggaggtgggcccaagaggcaagcctggaggcagggaggctggcgagaaagctggtgcagtcacccctggagaagtgatgagctgtgagctggccaaggccagaggagactgaagggcaaaaccaagaaccacgcagacatctgacaggcagtggtgtcggtagggagcaggatgggggccactcaagcctcttggtgctccccggccagggtctgccctgccttacctgacccgcccctcctccagctggcgcaggcgggcatctcgttggaggacgccagcaatggcctcctgctcctcctctgtcaggaagctgaggtccaacagtccttcagtctcaggctttggcccatgcgccatggggagggagggcagagcccaaagcccctcttgcgatgggtggcccctctggggcatcagctggggggctgtgccccagctgggcacacggagcttcctgggggcagaccgagggtcag

SEQ ID NO: 11 - DNA, 3514 bp, Homo sapiens
gaattcgaggatccgggtaccatggggctggagtggggaccgaggccctgctcactcccctggtgggccggcttgcccgcctgctggaggccacacccacagactcttgtggctatttccgggagaccattcggcgggacatccggcaggcgcgggagcggttcagtgggccacagctgcggcaggagctggctcgcctgcagcggagactggacagcgtggagctgctgagccccgacatcatcatgaacttgctgctctcctaccgcgatgtgcaggactactcggccatcattgagctggtggagacgctgcaggccttgcccacctgtgatgtggccgagcagcataatgtctgcttccactacacttttgccctcaaccggaggaacaggcctggggaccgggcgaaggccctgtctgtgctgctgccgctggtacagcttgagggctctgtggcgcccgatctgtactgcatgtgtggccgtatctacaaggacatgttcttcagctcgggtttccaggatgctgggcaccgggagcaggcctatcactggtatcgcaaggcttttgacgtagagcccagccttcactcaggcatcaatgcagctgtgctcctcattgctgccgggcagcactttgaggattccaaagagctccggctaataggcatgaagctgggctgcctgctggcccgcaaaggctgcgtggagaagatgcagtattactgggatgtgggtttctacctgggagcccagatcctcgccaatgaccccacccaggtggtgctggctgcagagcagctgtataagctcaatgcccccatatggtacctggtgtccgtgatggagaccttcctgctctaccagcacttcaggcccacgccagagccccctggagggccaccacgccgtgcccacttctggctccacttcttgctacagtcctgccaaccattcaagacagcctgtgcccagggcgaccagtgcttggtgctggtcctggagatgaacaaggtgctgctgcctgcaaagctcgaggttcggggtactgacccagtaagcacagtgaccctgagcctgctggagcctgagacccaggacattccctccagctggaccttcccagtcgcctccatatgcggagtcagcgcctcaaagcgcgacgagcgctgctgcttcctctatgcactccccccggctcaggacgtccagctgtgcttccccagcgtagggcactgccagtggttctgcggcctgatccaggcctgggtgacgaacccggattccacggcgcccgcggaggaggcggagggcgcgggggagatgttggagtttgattatgagtacacggagacgggcgagcggctggtgctgggcaagggcacgtatggggtggtgtacgcgggccgcgatcgccacacgagggtgcgcatcgccatcaaggagatcccggagcgggacagcaggttctctcagcccctgcatgaagagatcgctcttcacagacgcctgcgccacaagaacatagtgcgctatctgggctcagctagccagggcggctaccttaagatcttcatggaggaagtgcctggaggcagcctgtcctccttgctgcggtcggtgtggggacccctgaaggacaacgagagcaccatcagtttctacacccgccagatcctgcagggacttggctacttgcacgacaaccacatcgtgcacagggacataaaaggggacaatgtgctgatcaacaccttcagtgggctgctcaagatttctgacttcggcacctccaagcggctggcaggcatcacaccttgcactgagaccttcacaggaactctgcagtatatggccccagaaatcattgaccagggcccacgcgggtatgggaaagcagctgacatctggtcactgggctgcactgtcattgagatggccacaggtcgcccccccttccacgagctcgggagcccacaggctgccatgtttcaggtgggtatgtacaaggtccatccgccaatgcccagctctctgtcggccgaggcccaagcctttctcctccgaacttttgagccagacccccgcctccgagccagcgcccagacactgctgggggaccccttcctgcagcctgggaaaaggagccgcagccccagctccccacgacatgctccacggccctcagatgccccttctgccagtcccactccttcagccaactcaaccacccagtctcagacattcccgtgccctcaggcaccctctcagcacccacccagccccccgaagcgctgcctcagttatgggggcaccagccagctccgggtgcccgaggagcctgcggccgaggagcctgcgtctccggaggagagttcggggctgagcctgctgcaccaggagagcaagcgtcgggccatgctggccgcagtattggagcaggagctgccagcgctggcggagaatctgcaccaggagcagaagcaagagcagggggcccgtctgggcagaaaccatgtggaagagctgctgcgctgcctcggggcacacatccacactcccaaccgccggcagctcgcccaggagctgcgggcgctgcaaggacggctgagggcccagggccttgggcctgcgcttctgcacagaccgctgtttgccttcccggatgcggtgaagcagatcctccgcaagcgccagatccgtccacactggatgttcgttctggactcactgctcagccgtgctgtgcgggcagccctgggtgtgctaggaccggaggtggagaaggaggcggtctcaccgaggtcagaggagctgagtaatgaaggggactcccagcagagcccaggccagcagagcccgcttccggtggagcccgagcagggccccgctcctctgatggtgcagctgagcctcttgagggcagagactgatcggctgcgcgaaatcctggcggggaaggaacgggagtaccaggccctggtgcagcgggctctacagcggctgaatgaggaagcccggacctatgtcctggccccagagcctccaactgctctttcaacggaccagggcctggtgcagtggctacaggaactgaatgtggattcaggcaccatccaaatgctgttgaaccatagcttcaccctccacactctgctcacctatgccactcgagatgacctcatctacacccgcatcaggggagggatggtatgccgcatctggagggccatcttggcacagcgagcaggatccacaccagtcacctctggaccctgagagctgaatgagggcatcataggccagacaggcccaaggatggatgaatggagaggacaaaggcagcttctgacacaccagccccaggacctggggcgactggaggaagccaggcgagtggggcccaggactggttccagtgagagaaaccaaccacaggcacccaagcactaccagacaaagcgtattaaacagaacacttttgaaaaaaaaaaaaaaaaaaaaaaaaaaaa

SEQ ID NO: 12 - DNA, 3036 bp, Homo sapiens
atgaacttgctgctctcctaccgcgatgtgcaggactactcggccatcattgagctggtggagacgctgcaggccttgcccacctgtgatgtggccgagcagcataatgtctgcttccactacacttttgccctcaaccggaggaacaggcctggggaccgggcgaaggccctgtctgtgctgctgccgctggtacagcttgagggctctgtggcgcccgatctgtactgcatgtgtggccgtatctacaaggacatgttcttcagctcgggtttccaggatgctgggcaccgggagcaggcctatcactggtatcgcaaggcttttgacgtagagcccagccttcactcaggcatcaatgcagctgtgctcctcattgctgccgggcagcactttgaggattccaaagagctccggctaataggcatgaagctgggctgcctgctggcccgcaaaggctgcgtggagaagatgcagtattactgggatgtgggtttctacctgggagcccagatcctcgccaatgaccccacccaggtggtgctggctgcagagcagctgtataagctcaatgcccccatatggtacctggtgtccgtgatggagaccttcctgctctaccagcacttcaggcccacgccagagccccctggagggccaccacgccgtgcccacttctggctccacttcttgctacagtcctgccaaccattcaagacagcctgtgcccagggcgaccagtgcttggtgctggtcctggagatgaacaaggtgctgctgcctgcaaagctcgaggttcggggtactgacccagtaagcacagtgaccctgagcctgctggagcctgagacccaggacattccctccagctggaccttcccagtcgcctccatatgcggagtcagcgcctcaaagcgcgacgagcgctgctgcttcctctatgcactccccccggctcaggacgtccagctgtgcttccccagcgtagggcactgccagtggttctgcggcctgatccaggcctgggtgacgaacccggattccacggcgcccgcggaggaggcggagggcgcgggggagatgttggagtttgattatgagtacacggagacgggcgagcggctggtgctgggcaagggcacgtatggggtggtgtacgcgggccgcgatcgccacacgagggtgcgcatcgccatcaaggagatcccggagcgggacagcaggttctctcagcccctgcatgaagagatcgctcttcacagacgcctgcgccacaagaacatagtgcgctatctgggctcagctagccagggcggctaccttaagatcttcatggaggaagtgcctggaggcagcctgtcctccttgctgcggtcggtgtggggacccctgaaggacaacgagagcaccatcagtttctacacccgccagatcctgcagggacttggctacttgcacgacaaccacatcgtgcacagggacataaaaggggacaatgtgctgatcaacaccttcagtgggctgctcaagatttctgacttcggcacctccaagcggctggcaggcatcacaccttgcactgagaccttcacaggaactctgcagtatatggccccagaaatcattgaccagggcccacgcgggtatgggaaagcagctgacatctggtcactgggctgcactgtcattgagatggccacaggtcgcccccccttccacgagctcgggagcccacaggctgccatgtttcaggtgggtatgtacaaggtccatccgccaatgcccagctctctgtcggccgaggcccaagcctttctcctccgaacttttgagccagacccccgcctccgagccagcgcccagacactgctgggggaccccttcctgcagcctgggaaaaggagccgcagccccagctccccacgacatgctccacggccctcagatgccccttctgccagtcccactccttcagccaactcaaccacccagtctcagacattcccgtgccctcaggcaccctctcagcacccacccagccccccgaagcgctgcctcagttatgggggcaccagccagctccgggtgcccgaggagcctgcggccgaggagcctgcgtctccggaggagagttcggggctgagcctgctgcaccaggagagcaagcgtcgggccatgctggccgcagtattggagcaggagctgccagcgctggcggagaatctgcaccaggagcagaagcaagagcagggggcccgtctgggcagaaaccatgtggaagagctgctgcgctgcctcggggcacacatccacactcccaaccgccggcagctcgcccaggagctgcgggcgctgcaaggacggctgagggcccagggccttgggcctgcgcttctgcacagaccgctgtttgccttcccggatgcggtgaagcagatcctccgcaagcgccagatccgtccacactggatgttcgttctggactcactgctcagccgtgctgtgcgggcagccctgggtgtgctaggaccggaggtggagaaggaggcggtctcaccgaggtcagaggagctgagtaatgaaggggactcccagcagagcccaggccagcagagcccgcttccggtggagcccgagcagggccccgctcctctgatggtgcagctgagcctcttgagggcagagactgatcggctgcgcgaaatcctggcggggaaggaacgggagtaccaggccctggtgcagcgggctctacagcggctgaatgaggaagcccggacctatgtcctggccccagagcctccaactgctctttcaacggaccagggcctggtgcagtggctacaggaactgaatgtggattcaggcaccatccaaatgctgttgaaccatagcttcaccctccacactctgctcacctatgccactcgagatgacctcatctacacccgcatcaggggagggatggtatgccgcatctggagggccatcttggcacagcgagcaggatccacaccagtcacctctggaccctga

SEQ ID NO: 13 - DNA, 26993 bp, Mus musculus
  misc_feature (5740)..(7267): "n" at positions 5740 through 7267 can be any base.
  misc_feature (11948)..(11967): "n" at positions 11948 through 11967 can be any base.
  misc_feature (20513)..(23225): "n" at positions 20513 through 23225 can be any base.
  misc_feature (24371)..(24800): "n" at positions 24371 through 24800 can be any base.
  misc_feature (25973)..(26272): "n" at positons 25973 through 26272 can be any base.
ctcactccgccagtctgaagcatccgggctctgtctgtgaaacagtccgcgaactgggagggtctacccactggccccagcacccctcctcccaaggccccccatgctgctgcttcatgtgaccagggctgggccgaatctctgagcagacagagagaagcatggtgtgaccgcatgagtggagtgagttctggggacagtgcccagttgtgcgatagacagcagattccggaggaccactgtgcatgtgtgtgtgttgttgtatttggtttgtgtttgtgagtatgtctgtgtgtgtgtgtgtgtgtgagagagagagagagagagagagagagagacagacagacagacagagacagagacagagacaaagagagttgtgtgaggaccactgtgcatgtgtgtgtgttgtgtgaatgtttgtgagtgtgtgtgttgttgtatttggtttgtgtttgtgagtgtatctgtgtgtgtgagagagagacagagagacagagagagagagagagagagagagacagacagacagacagacagacagagagacagacagagagagacagagagagacagagagagagagagagttgtgtgagggcctcccaggtgatctgggaagcttgtgaatgtgaaagtgcctgtgggtggcttcacctctggcagaggcattctgcctcctgtatattaactatgtgtgctcagacaatccactcaaagatgctctggggctgcagctgatagagcagcttacttagtgtgcacaaggccgtgggtgcaaacaccccagaactacaatcccagaactctctctgcgcactgaactcgacttcctcatttgtttcttgtttcttttttttgacggagtctaacattgtccggattgcttcaaactttatagcggaggaagatcgatggcaattcttctgcctccaccttctgagtgctaggattgcaggcatgtaccctcatgcccagttgagacagtatcagtgattgaacccagggcctcacgcctcctggagaagccctgtaccatggagctacaagtctagttccttttcttgtccttaaaaaaaataaaaagctgggtcttcttatagcccaggctggctttgtactccccatcctcctgcctcagcctcccaagtgctgggatgataggcttatggcacggccatgatagcacctacaatttccagagttgcctgtcctttgcagtgtactatgccttgtgagggacaggctctgagggtctgcttgtgatcacacacctgaggacctgtttgctgggagttctgtccccatttctttgccaggctggaagacactgacacacccaccatggtgacagtacccatggacttaaatggtgtgactccctctgctctaatgggagggtctcagtgccccgtatctgctgtttctcaaatggggtaggtaatacagagataggagggctgacacaaaacatatcaaacaccaagatagcaaaggctagaatgagaccctgtctcaagctttcccatagagaaggggagtgtataattgcacccactcacaagactgttggccataaacaagtttgtatggaaaatgtttacaaagtgcttggcacatccaggggtggtggcgcacacctggattctcatacttggagagaagagccaggaagattagggacggttccagtcaggcctacatattgagaccttatctcaaaaacaaaacaacacaacacacacacacacacacacacacacacacacctcaaaaacctctggaagttcacattttgggaaaggcatctgaatggtaaagtgtagggattaagagtagagactagagtccctccatgggaccgagatgtagaaaagaaagaaaagagagcttgctaaagcaggccagcctaagggcagactcctgaaaggacttgctccaaatgattgttgagggtggaggactctaagaaactggaattgtgggaaaaactctcggggaatgacaaaagccggtttgcaggttggtgagattagaaagtaatggccacaatatagggcacaatatacaggctggtcttgaacttgtaatcctcctgcctcaacctcccaactattataggtatatgtcaccagctggatgcttttgcctgtcttgtttctttctgtgccccagggcttcagtgaatagggatggctgccgattaaataactgaattgctagcagggtgggtgagtcagggctttaatcccagccttcaggaggcagaggcacacagatctttgtgagttcgaggctaacctggttaacagagagagttccaggacagtcagagctacacagagaaaccttggctcaaaaaacaacaaaatatctgaatggctgattgaatgactgggcagatggacagatagacagatggacatgtacgatccacagacatgtacgatctttgggatggtggggaaggcttggtagctaacacaggctggctcaagacctgcttctgggaaccctttctttcctttgtatcctcagctctgggtcatgaagggtgtggagtgggccgggaagggagtgtcaggctcagtggctgcttgccttggattctggcccagagtgtctggaggaagaagagggtatctcggcatctgagtcaccttagagaaaccctagccacatacctgacttctgacatcacacaaccagggcaaccctggtggccgagacaaggagactgaatcatggactgaaatcagtcaccttgggcatgggcacgtggccgctagtgaccccctgagacacccccgagtggctgtctggctgtgtgggcatgcaaaccacatcaaggtcagtaaaggctctccagcctgagtcagggacagggtggccactgccagagaccaccgaccacagcatctgcaggacaggaagagaaagttgagggagaaaaggcagagggtaggccccagtcagggagagggaagtgcctgtgggagaaaggggaagctgtggcttgcggccagtagcctggtgacctgtggctgggatgtggaatggggtcttagtgtttgcgcacagaatggcgaagttgcaagcgaggctcagaggacaatggagtcagcagacaatgggctcttacacttgcacacgcaggcacaggcgcacaaaagccagcgtgggagccctaccctccagccaccccagagctacagcttgccacacacacacaagactgtccccacaagactcgcttcctttaccctattaagtgacatccgtaattctcattgtgaagattgcaactctcggtattttgatgatctcatttgatatgaataacttagacatttgcagtgccaggcactgttgtagactatttagctgtgctagggattgaacccagggcttcttgcattctgggcaaacatcctgccactgagcttgctcccagacccacgtgcccatggtttgtccccagacccctgttttatatgtaattctgagacaaggtctcactgtaatgcccagagacccttgagctcactctattacccagccttgaactcactgatccttctgcagggattgtaggcatgactagctagacacagctaagtatctgttagagcgtgtatgtgtaccttggggcagacatctgtccaactgtatatgtctatacattgttaggtttcaaacaaatggctgaggtgcctatttaacatatcaagaggacctggcccccaatttctccctgcaataactcagctcctatatgccctcctggctggcataccccacccgctatgctgaacttctccagcccaggggctgggctgttcatccctatgtaatccaactattttagctctcccctctctttgtaccttaaggctgcacctggctcccatggctcccctccctctctccccacacggctcagggttaagtcgactctggactatcctagaggtccctgcctctggctatgctctcccacatatctataataaactctcctctgcatacctaggaacagtcatgttcccttcctttctctttcttaatttccttttcttttcattcatacatacgtttctttggattctgtattctattctccctccttaaaaatatacacagctagccaggcatggtgatgcacacctttaatcccagcactcgagaggcagacacaggtggatctctgtgagttcgagaccagcctagtctacagattgagttccaggcctgtctggcctatacagtgagatcctcaaaaagaaaaatgtacacacactacccccttcaagtcagaagaccctgagacacaagcccatccatcgccgggcagcatgggaaaagcaggttgttacaaatgcctggagtcaggtctgacactcacacacaaggtccctgccaccagttgatccagcagctacattcgaaggatcagagaggtccagataactgtgctgccctgtcagaccttatgaatgaagacctgaatggaggctgatgtctgtaattccagcactcgggaggcactcaggaggcaaggaggattggagggagttagctggaggccagcctatgctatagagtaagactgcttcaaacaagagaaatgagaactgaaaagattgctcagtgggtagaggcgcttgcctgcaagtctaaggaactgagttcaattcctgacatttgcatgatggaagaaaagaaactccttcaaggtcacacacacacacacacacacactcaaagaagtaaaaatactttttaatttaaaagaacagagaaacttgaacacatggtcggtctgcgatgtggctctgcagtaatgcctgccttggatgtatgtagtcctggttttgaccccaccattatacagaccaggtgtggtgatacaaacctgtaattccagcactgggggctggagccaagacgatgggagaagttctaggtggctcatccttggctaaaaaaacatagcctgagctacctgacactggttgctagtgtgagctatctgagactctgcctcacaaataattaagtaaaaatatggtagattcatgacgacagcacctacagattgcctgtcctgtgctgggacacagggcagcttcacactaaccctgatgggaacacctgggagacgacatgcttgttgcaaggcgctggctcatctgagaccaaagcgacttcaggagccaagtagaccagaatccgtgtgcttcagacagtgggaagggcatacagaaacctcaggaactgaggcacagcagggagatgggaggctgggacaagggaccactgacagacaccatacatcataccatcttgtccctctgaatctccatgggcaccccctctgggaggactccaggactgcaagcaaaggttaactgagtcagccaattcaaccctggcctagggggtggaggcagggggtctatcagcgcgaggagacaggacaaggacactcatgtattgccatagggatggctctcttgtcaaaccatcagaacacccacaaacatcccggctcacaggggtctgcaggggtagggctgggatgtggcccgagacttgtgggaactgaggaatgtagtggcaaaagtttggccaagggaagaccagaggactctgtatgcatgaaggccagggtgatgacatttcaggaaagaaaagcacagaatcaagcatggtaggtagttggaaagtggaagcgggnnnnnnnnnnnnnnnnnnnnnnnnnnnnnnnnnnnnnnnnnnnnnnnnnnnnnnnnnnnnnnnnnnnnnnnnnnnnnnnnnnnnnnnnnnnnnnnnnnnnnnnnnnnnnnnnnnnnnnnnnnnnnnnnnnnnnnnnnnnnnnnnnnnnnnnnnnnnnnnnnnnnnnnnnnnnnnnnnnnnnnnnnnnnnnnnnnnnnnnnnnnnnnnnnnnnnnnnnnnnnnnnnnnnnnnnnnnnnnnnnnnnnnnnnnnnnnnnnnnnnnnnnnnnnnnnnnnnnnnnnnnnnnnnnnnnnnnnnnnnnnnnnnnnnnnnnnnnnnnnnnnnnnnnnnnnnnnnnnnnnnnnnnnnnnnnnnnnnnnnnnnnnnnnnnnnnnnnnnnnnnnnnnnnnnnnnnnnnnnnnnnnnnnnnnnnnnnnnnnnnnnnnnnnnnnnnnnnnnnnnnnnnnnnnnnnnnnnnnnnnnnnnnnnnnnnnnnnnnnnnnnnnnnnnnnnnnnnnnnnnnnnnnnnnnnnnnnnnnnnnnnnnnnnnnnnnnnnnnnnnnnnnnnnnnnnnnnnnnnnnnnnnnnnnnnnnnnnnnnnnnnnnnnnnnnnnnnnnnnnnnnnnnnnnnnnnnnnnnnnnnnnnnnnnnnnnnnnnnnnnnnnnnnnnnnnnnnnnnnnnnnnnnnnnnnnnnnnnnnnnnnnnnnnnnnnnnnnnnnnnnnnnnnnnnnnnnnnnnnnnnnnnnnnnnnnnnnnnnnnnnnnnnnnnnnnnnnnnnnnnnnnnnnnnnnnnnnnnnnnnnnnnnnnnnnnnnnnnnnnnnnnnnnnnnnnnnnnnnnnnnnnnnnnnnnnnnnnnnnnnnnnnnnnnnnnnnnnnnnnnnnnnnnnnnnnnnnnnnnnnnnnnnnnnnnnnnnnnnnnnnnnnnnnnnnnnnnnnnnnnnnnnnnnnnnnnnnnnnnnnnnnnnnnnnnnnnnnnnnnnnnnnnnnnnnnnnnnnnnnnnnnnnnnnnnnnnnnnnnnnnnnnnnnnnnnnnnnnnnnnnnnnnnnnnnnnnnnnnnnnnnnnnnnnnnnnnnnnnnnnnnnnnnnnnnnnnnnnnnnnnnnnnnnnnnnnnnnnnnnnnnnnnnnnnnnnnnnnnnnnnnnnnnnnnnnnnnnnnnnnnnnnnnnnnnnnnnnnnnnnnnnnnnnnnnnnnnnnnnnnnnnnnnnnnnnnnnnnnnnnnnnnnnnnnnnnnnnnnnnnnnnnnnnnnnnnnnnnnnnnnnnnnnnnnnnnnnnnnnnnnnnnnnnnnnnnnnnnnnnnnnnnnnnnnnnnnnnnnnnnnnnnnnnnnnnnnnnnnnnnnnnnnnnnnnnnnnnnnnnnnnnnnnnnnnnnnnnnnnnnnnnnnnnnnnnnnnnnnnnnnnnnnnnnnnnnnnnnnnnnnnnnnnnnnnnnnnnnnnnnnnnnnnnnnnnnnnnnnnnnnnnnnnnnnnnnnnnnnnnnnnnnnnnnnnnnnnnnnnnnnnnnnnnnnnnnnnnnnnnnnnnnnnnnnnnnnnnnnnnnnnnnnnnaccacatttactaagcccctccctgccaaagtaagcaataaattatggctaagagtctccccactcctaagatggaaagatgccaagctgcaaaggagatcctgacaacagaccagctacttggaagactcagaacctagccaagctgcctgcaagaggtttagaccaactaagacatctggagagagcaccctccaatctgtggagcagtcttcaggctctgcagggtgctccaggctcccagctttgtaagctgtcactcatgctggggcgggcttgggtgacgcagctgtctttgagtgacttctcccgtaagtcacccctcacccatgcacactcctgtaagtaactctaatagaaaattcatcggttcagcaaattggactttggtctcttctgagctggctccctgtctagggtgaatggacatgtgtgtgtggcatctcccctggaaaagttttctttccctaggcttggcctggggtctcccaggctttttgcagttgctggtggcatccttcttagtgggtacttaagaatcaggaccctggccagcgatgcagcagccgttggcagagggctcccctagcatgcaggaggcccctggattacatccccagtaataaaccaggcctggcgacaatatagaggtgagagcaagatgttcattgtcatccttgggtacatagtaaattctagtctttgttttaaaaacaaacaaacaaacaaacaagcaggacataagatcagatatgcctggcatggtggaaggtgcctttaactccaacactcaagaggtagaggtcatcctggcctacagaatgaattccaggccaaaggtggtacataatgagaccccatctcaaaaacagacagagaaaggaggagggcaaagggtagaaagaggaggggatgttcacaatagggggaggggatgttcacaatacgtgtatatatattctttccttctggatgtggatagaacccaggacttcacacatgctagacattcattccactttaagctacattcccgccctcacatccccttttgtttaaatcattaatattgatattattattattattattattattattattactacatatgagtactggttgttttctgtctttgcatgcatgtggagatcagagaacaatttttaggagtcatttttcttcttccaccgtgagtcccagggatgggactcaggttgtcaggtatgtgtagcaagctcctttacctgtgaaccatcttgctggggctgatacctgctgattgctaaacacatgccaccgattatattaatgcactagtattttatttatttatttttcgagacagggtttctctgtgtagccctggctgtcctggaactcactctgtagaacaagctggtttcgaactcacagagatctccctgcttctgctgggattaaagatgtgtgctgctgccgcagctgccaccaccaccagacaccaccaattattattgttcaattattattgtatacacactttcttttctgtctcctgagctaagtgggaaggagaggcttccaacaccatcaagcctgaagaactcaccgggtgtgggttcctacctgctccaattctgcaggtcccccagattcagggacccggaaaagccacctatcctttgcttagctatgagtactgaagttttagatcagggagggagcacattttccaagctcaccgagtcacacagaatccgtgacaaagctagtggggaggggactgcatccttacccatccctacacctggggatatcacagactctccaattccccctgagcctcagtttccccacctagactgattatacccctctcgccagaatctgcactggggaccttgctctttttcaccagcaggggcgctgcaccggtttggggagggtggggtcccaggggtataagcagacctgggatctggagttgcaccttctccaacccgggtcagcaggggccttctgagggagtttaggcgcctgtcaatctcagcctccgggacagcgtggaactgcgcaggcgcgggcgggttccgcacagcgcaacagcgggcgcgcgcgggagcgagggattccctctgacgtaattgctaggataccaaacaaacactgggccgcgctggccgagctccttatatggctaattgcgtcacaggaactccggggagggcggggcgggatcccctcccgcgaagcccctcagaacgcagccttggggacccccgagacccccagggtcacactatgggcaggtggcaggtgcacgaggccctggagggcgccacaaggagctcagtcggcgggaagggagagtttgggaggtttgtgcatggagttgcgggtgacgcaagcgcggggggcgggtcccggaggcataaattcagcccggcagctcccggtttcattcataagactggagcggctacgccggggacacgcggagccggggcttgctggacttgactactggtgactctttctttttcttcttcttggaggccgtgaaaaatttatatatatatatttatatatatttttaaactggagagaaagttttgtgggtttcctttttgcaagactctttctagatcgttcttccgattcgtccggaggatagactttctttctgtgggcttctggatcgcgcccctctgctctccctcatttcttgggacgcttcgacaggattggaactgcatctgaagcgcacgctgcaccgcggcactgcccggcgggtttctgggcggggagcgatccccgcgtcgccccccgtgaaaccgacagagcctggactttcaggaggtacagcggcggtctgaaggggatctgggatcttgcagagggaacttgcatcgaaacttgggcagttctccgaaccggagactaagcttccccgagcagcgcactttggagacgtgtccggtctactccggactcgcatctcattccactcggccatagccttggcttcccggcgacctcagcgtggtcacaggggcccccctgtgcccagggaaatgtttcaagcttttcccggagactacgactccggctcccggtgtagctcatcaccctccgccgagtctcagtacctgtcttcggtggactccttcggcagtccacccaccgccgccgcctcccaggtaagttctagatcgtaaagattctactttagtggttgggggggggtgtttctttcaggctaaagtgtagattgagcatcctctcaaatagagacgcgccaaaacccaggatctgggattgcaatagttcggtttgcactttggttttttgttgtttgcaaactgcaaagaatggagtgatgtttgcaaaaggttatttgcgcggagcgcgggaaaggaatgcagctgggcaaacgttggcgatgcccggtgcaaagtatatacccggtggttagcagaagctgagaacttttagccgaaagccggctccctaagccgaagctaggcaagtaggggaagaaaaagaaacaaaaaattccagagaagcttccaggagcctcctcctcttccctcttccttcaaaacgcggactgcaagtccgcagtcaccctccacccagcaagagttagggcctcgaaccccggtcacgctgcctccgcctcctgcgcggagacgtaacgggggacccgtgcgtaaaggctgacgcgctggaatcctccgtctgacgcggggcacgcacagcgcgcagcgccccctccgcccgccccgcccctgacgtcccgggcacgttctattttggaacgccgaggccacgttgctaagggagggggcagcgtggctttgtgattggctgtcgcggcgcgagctttagccaatcagcgttcccttcctatttgtagagcgtagctcccttccttgctttttgtggttcttcccgtgctgggggtctccaagagggagagctaggggattcttgtcgcgatcgggggactcgttgtcaccccatgggtctgcgaggaccttgtgtggacctggtcctgttgtcataagctagaggcttttggctgagtgttagcgcctctaagggggaactgaaggcctcatcccttctccaggcacacatatacgtgctccctgagctctagacactcagtccttccgaggtgttcaaacactagatgagctagcctacggagaggcagccaggtggtctctaaaaggtccgccttcccttagttcccagggctctgattggccagggattcagcccttccctcgccacgccccctagagtagttaagcctctaggattccacttgcgggaaggggggggggggcgtgatggacgcttcttgggttcggggacgcagatcctatgtcaccccatcccctgcaagacagtctgagagattctcgctgtcacttttctctgcctatcagttcactgaaacctgtcagtctcactggggaagagacagacactcggaagggatgctctcaactcttaggccggtcccccaacaccgttggaactgggatctccgcccctgcgggagccctcatgcagtggggggtgtgtttgtgtgtgagtggaggagaggaaggcttgggctaaggcctctccctctccctacctactgtggtgggggtggggtgttttggctgtatgtgtgtgtgannnnnnnnnnnnnnnnnnnnctgacttgaagggggtagtgtgtgtacatttttctttttgagacaggatctcactgtataggccagacaggcctggaactcaatctgtagactaggctggtctcgaactcacagagatccacctgtgtctgtggctccagtcccgggattaaaggtttgcatcaccaggttctgtccagcctccgtctcccacccacccccccacacctaagagtcaccaacccggggtgtgattcaccacccgctggaaccgtgcaacctttccccgaggaagaaggaggaggtagaaggcagttgaacagaatctctcattaaccactgcgtcacggtgtagtggaagggtgggtgttgtggctttttgcctgtgacacacacatccacacccgctcaccctgtgctcactcacaggggtcggtgtgtgttatgtgtgttgggcgtgtgtgtgtcggtggctttgtttgtgtgtctacgcctgtgtgtgtatgtctcaccccgtaggagtgcgccggtctcggggaaatgcccggctccttcgtgccaacggtcaccgcaatcacaaccagccaggatcttcagtggctcgtgcaacccaccctcatctcttccatggcccagtcccaggggcagccactggcctcccagcctccagctgttgacccttatgacatgccaggaaccagctactcaaccccaggcctgagtgcctacagcactggcggggcaagcggaagtggtgggccttcaaccagcacaaccaccagtggacctgtgtctgcccgtccagccagagccaggcctagaagaccccgagaagagacagtaagtatgaggcctcaggagttgggatggaggagcctagctagggatgtgggctcagtttgtacagtgcttgctgccatgcatgaagatccctagcacagcataagccaggagtggttatgcagacctgtaaccccagctctcagaaggtggaggcaggaggagcaggagttcgaggccagcctgtgctacttatggagtccagcctgcactgcaagagatcattattttcaaaagttggccttggggggaggtgggtgagggaagtaagagaaagtgacagtaattttatcacttaatagttggaggttcctctgaggcctcaagtctgaaggaactttaccattctggccagtgaggagtaggggttattatttggggttcaggaggaaggagttttcttagggctgatagaggtacccccagatctcatggtccttatctctgactcagcttaccccagaagaagaagaaaagcgaagggttcgcagagagcggaacaagctggctgcagctaagtgcaggaaccgtcggagggagctgacagatcgacttcaggcggtaaggaggagtctgggggtgtcttgaggccgtgctgggagcactctgccttgttcttcccccgtttctcactgtgcctgtgtcctaaacgaggaaaccccctcttagggaacaggggtcagtataggctgatggagtggctccatatgcatgctcagacccatgcccacttactttcgactgttccccactttccctgaatatgtccccacatgtcaccctcctggctttctctcagcctaaggagacaagctggaggaggtaattctctcaccttctttccttcactaaataataatccattttgccttcctgcctccatttttttttcctgagctggggatctacctgtgtagttcagccctcctcccccaacttgatagcctcaagtttcagcccttggctgagatgccatcatcctgactggctctggctggaaactattttgtgctaagtcaattccttacctgctactccagctatctacagttctgccgaacttgagctggtggcgcccaccaagcccacttctttctctcttctacctcagtgcaacccccacacacacacacacacctcatgcctgccccttgaaaccagggtgtgtctctgatttcccgtcgggaggctgaaggagatgggtaacagaacctcattaaaaacaacacataagcattacctactgactcaacaaactgtagtgtttttcttttttcctctcaaaaaattatttcgtttgtttatttattatttgcttatgtttgagtgagtgctggtgcaccacagcacacatacgaggtcagagggaaattttcatagtttgttctctccttccgtgttgtgggtgcttgctggcaatctccttcactcagtgagctacaatgcccccttctgccctttaaggcagagtactccttagtacagggggaccctttcctcggcctctcaaagttgagattacaaatgttcaccatcacaccaggcttggagttcttgcctatcagtgacgtccactcctgcctagcttcttcccaaccatctcttagtctgatggggaaaccgaggcacgagtagcatggtctaccaggatttcctcttaggggacggtcccctcagttgggagggagctgtccagccccctggatcagcagcaagaatgtatgagtgtggggttgggcgggtgaagctactctgtgtggtcgctgaccagcaattctcctttctctgtctcctatgacctggccctgctgggatccattaggaaactgatcagcttgaagaggaaaaggcagagctggagtcggagatcgccgagctgcaaaaagagaaggaacgcctggagtttgtcctggtggcccacaaaccgggctgcaagatcccctacgaagaggggccggggccaggcccgctggccgaggtgagagatttgccagggtcaacatccgctaaggaagacggcttcggctggctgctgccgccccctccaccaccgcccctgcccttccagagcagccgagacgcaccccccaacctgacggcttctctctttacacacagtgaagttcaagtcctcggcgaccccttccccgttgttagcccttcgtacacttcctcgtttgtcctcacctgcccggaggtctccgcgttcgccggcgcccaacgcaccagcggcagcgagcagccgtccgacccgctgaactcgccctcccttcttgctctgtaaactctttagacaaacaaaacaaacaaacccgcaaggaacaaggaggaggaagatgaggaggagaggggaggaagcagtccgggggtgtgtgtgtggaccctttgactcttctgtctgaccacctgccgcctctgccatcggacatgacggaaggacctcctttgtgttttgtgctctgtctctggttttctgtgccccggcgagaccggagagctggtgactttggggacagggggtggggcggggatggacacccctcctgcatatctttgtcctgttacttcaacccaacttctggggatagatggctggctgggtgggtagggtggggtgcaacgcccacctttggcgtcttgcgtgaggctggaggggaaagggtgctgagtgtggggtgcagggtgggttgaggtcgagctggcatgcacctccagagagacccaacgaggaaatgacagcaccgtcctgtccttcttttcccccacccacccatccaccctcaagggtgcagggtgaccaagatagctctgttttgctccctcgggccttagctgattaacttaacatttccaagaggttacaacctcctccgggacgaattgagcccccgactgagggaagtcgatgccccctttgggagtctgctaaccccacttcccgctgattccaaaatgtgaacccctatctgattgctcagtcttgccctcctgggaaaactggctcaggttggatttttttcctcatctgctacagagccccctcccaactcaggcccgctcccacccctgtgcagtattatgctacgtccctctcaccctcacccccaccccaggcgcccttggccgtcctcgttgggccttactggttttgggcagcagggggcgctgcgacgcccatcttgctggagcgctttatactgtgaatgagtggtcggattgctgggtgcgccggatgggattgacccccagccctccaaaactttccctgggcctccccttcttccacttgcttcctccctccccttgacagggagttagactcgaaaggatgaccacgacgcatcccggtggccttcttgctcaggccccagactttttctctttaagtccttcgccttccccagcctaggacgccaacttctccccaccctgggagccccgcatcctctcacagaggtcgaggcaattttcagagaagttttcagggctgaggctttggctcccctatcctcgatatttgaatccccaaatatttttggactagcatacttaagagggggctgagttcccactatcccactccatccaattccttcagtcccaaagacgagttctgtcccttccctccagctttcacctcgtgagaatcccacgagtcagatttctattttttaatattggggagatgggccctaccgcccgtcccccgtgctgcatggaacattccataccctgtcctgggccctaggttccaaacctaatcccaaaccccacccccagctatttatccctttcctggttcccaaaaagcacttatatctattatgtataaataaatatattatatatgagtgtgcgtgtgtgtgcgtgtgcgtgcgtgcgtgcgtgcgagcttccttgttttcaagtgtgctgtggagttcaaaatcgcttctggggatttgagtcagactttctggctgtccctttttgtcacttttttgttgttgtctcggctcctctggctgttggagacagtcccggcctctccctttatcctttctcaagtctgtctcgctcagaccacttccaacatgtctccactctcaatgactctgatctccggtctgtctgttaattctggatttgtcggggacatgcaattttacttctgtaagtaagtgtgactgggtggtagattttttacaatctatatcgttgagaattctgggtggaaatgtctgatcaggagaagggcctgccactgccgaccacaattcattgactccatagccctcacccaggctgtatttgtgatttttttcattttgtttttttgtattttgcacctgaccccgggggtgctggggcagtctagcactgggcagctcccctcccccccttggttctgcactgtcgccaataaaaagcttttaaaaaactgtattcttcaggtcaaagtgtctgttttccctggacatctactacatggcttcctttcagaaaaacggagtttggattgctagggaggtcttgctggcacttagtgggacgcctaatgaatcagaacctacaacgggactaaaaggaagtggagacttgctaggttttcccatgttcccaggctgggccacctacttgaaaaaataaggggcggaaaagtgtaaggtacaaatttggtgaagggtctggaagacttcatgatcggaaaagaatttattcaccttgggtgtgcaatgacttcagcaacagctaagggcaaggtgtaaaagctgggcacacttgtaaatcctagcatttgagaggtggaggcaaggggatcactggtggagttcagtgtcatgtggatcgtagataccaagcgcaaagatctgctatggggagagggcttggtacaccaggggagccagaagttcgtggtgagggtagtggagggcaggtggagagtgagagttagcctcagggagattctacaggcaatgatgcagagttcagacgctcctttgaaagcactagagagccgcagcaggttttgagcagagaaggttagcgttaggtggtctcttctagcccatcccaggctgaggaggacgctgagggtttcaagaaggatcgagaatggaaagcagaggagaaaaaggatccaagaggcatggaggaggcagaacacatttctcttctttaatagcaagcctggaaaggataacttgctgcaggaggagatgctcaccagtcgggtggtctagggggttcttggaaaagagaaggcatttgctcaagcctcggttcccccattctcgctcttctgtcagcttgtcttccattaagtgtgtgtctcaaggccaccctgctcaggactccttgtgagacgaccttctatgctcgagttcattaaaaacacaattgcctggtgccctgctctctccactggctcagttacctcaaaagaccagggctaaaggtgtgatcacaactctatccccattactgctccaacgcagagacaggactgagccggagtgaacaaatgaacaaaaatgactaataatgcatgcgtgattaaatacataaaagagcagatgactggatgagcaaatcgtttaaggagagacagcaagatcctagaattttggagactaatttaaatccatctttgagatgtatttggtcggaaattcctgggaggaaaaaaagtgtaagtatgaagagagaataaatgagaataggggtggcttcagagaggttaactgcgcgctggtcgcttttgtacaagaatgtgaattgcagggagcaaaatgggatagatactcccgcccgaaaggtggaattgaaccactctgtcgctaaacagctacaggtttgaagcctgcaccccagaccactgaggatcatccgggcgaaaggagctattttcggttagttatataaaggccagatactactacttttttcacttatggtcattatttgtggtatacagtagataattaatttcaatggtttcgaacattttttttcactttttcttgtgaacatgtgtttcctcagtaaagtgttccgtgaatgactctactaactaaaaagtaagtagcttcatttgcatagcgccttgcattctgggaagcagcgcctaaagtgcctgtctccctaactaaaagcagaattttttgcaaagtgaaaagtcagttttatttttgtttgtttgtttgtttgtttgtttttaatggaaaaacttctcacgcggcccattcgtagcagaattcgagattttctgcaagcgagaccgtagggtctgacggcacgcggccgcagagcgacacctgccgttgctttatagaactgcaagtatgtagggaatctactgagtccctaaggtgatggagttgacaaccaactccccttgcgtttagacgctaaaaaccatccctttttatatctatgtgattagcccagggaaactaaggctcagacatggataataccacagccgagttcctgtagcccaactccctaggggaaatgaaacctacagttgtggttttaatatgcttggcccaggggcagtggccctattggcaggagtggccttattagaggaggtgtaccttgttagaggaagtgtgtcacttggaggcgaggttttgaggtacgtatgctcaagtctggccagtgtgatcctggctgtctgcagaacgcggtctcctggctgccttcggatcaaggtgtagaactctcagctccttctccagcaccatgtctgcctgcttaatgctttgcttctttccatgacgataatgaactgtgcctctgaaactgtaagtcaaccccaattacacaattacatgttttcttttataagagttgcatatatatatatatatgtcacactctttagctctggctggcctgaaattcactatgtagcccaggattgcctgaactttgaagcaatcttcctgcctcagcctcccaatggtattacaggcatgagtcacaacaagccatttaaatcttatgatgacttataagaagacagaaaatcagagttcctttacctagttcacagatccctacaatctaacctcgttcgctccataaacagccctaccccaccctcctggaactgctttgaggaatgctgcaggctctcacaggcacactcctccttggttaatctcttcagcctggttgccttccctccccatgtccatgtggcccaaagcctctcatcctgttctcaaataccactagctagtaaggcctccccgacctgaccccggtttaaatattagaaaagggtcactttctcccctgccacagacaaccaaaccaccatatgcttgtcacttactacctgactatgaaggtgaatagatgtcttcacaacctttctctgagcctcagtttccccacctgcataatgcatctgagacacagaattccctagagctgtggttctcctcattcctagtgctgggaccctttaatacatttcctcatgttgtggtgactccaccaccaccataaaattattttcattgatacttcataactgtaattttttctattgttatgaatagtaatgtaagcatttgtgtttcccagtgatcttagatgaccctgtggaagagtcattccacccccaaaggggtccccaccacaagttaagaattcctgccatagaggaatcacaaggaaccaatgaattacactttgggtcgacttttgggctggcctctgggaggcgnnnnnnnnnnnnnnnnnnnnnnnnnnnnnnnnnnnnnnnnnnnnnnnnnnnnnnnnnnnnnnnnnnnnnnnnnnnnnnnnnnnnnnnnnnnnnnnnnnnnnnnnnnnnnnnnnnnnnnnnnnnnnnnnnnnnnnnnnnnnnnnnnnnnnnnnnnnnnnnnnnnnnnnnnnnnnnnnnnnnnnnnnnnnnnnnnnnnnnnnnnnnnnnnnnnnnnnnnnnnnnnnnnnnnnnnnnnnnnnnnnnnnnnnnnnnnnnnnnnnnnnnnnnnnnnnnnnnnnnnnnnnnnnnnnnnnnnnnnnnnnnnnnnnnnnnnnnnnnnnnnnnnnnnnnnnnnnnnnnnnnnnnnnnnnnnnnnnnnnnnnnnnnnnnnnnnnnnnnnnnnnnnnnnnnnnnnnnnnnnnnnnnnnnnnnnnnnnnnnnnnnnnnnnnnnnnnnnnnnnnnnnnnnnnnnnnnnnnnnnnnnnnnnnnnnnnnnnnnnnnnnnnnnnnnnnnnnnnnnnnnnnnnnnnnnnnnnnnnnnnnnnnnnnnnnnnnnnnnnnnnnnnnnnnnnnnnnnnnnnnnnnnnnnnnnnnnnnnnnnnnnnnnnnnnnnnnnnnnnnnnnnnnnnnnnnnnnnnnnnnnnnnnnnnnnnnnnnnnnnnnnnnnnnnnnnnnnnnnnnnnnnnnnnnnnnnnnnnnnnnnnnnnnnnnnnnnnnnnnnnnnnnnnnnnnnnnnnnnnnnnnnnnnnnnnnnnnnnnnnnnnnnnnnnnnnnnnnnnnnnnnnnnnnnnnnnnnnnnnnnnnnnnnnnnnnnnnnnnnnnnnnnnnnnnnnnnnnnnnnnnnnnnnnnnnnnnnnnnnnnnnnnnnnnnnnnnnnnnnnnnnnnnnnnnnnnnnnnnnnnnnnnnnnnnnnnnnnnnnnnnnnnnnnnnnnnnnnnnnnnnnnnnnnnnnnnnnnnnnnnnnnnnnnnnnnnnnnnnnnnnnnnnnnnnnnnnnnnnnnnnnnnnnnnnnnnnnnnnnnnnnnnnnnnnnnnnnnnnnnnnnnnnnnnnnnnnnnnnnnnnnnnnnnnnnnnnnnnnnnnnnnnnnnnnnnnnnnnnnnnnnnnnnnnnnnnnnnnnnnnnnnnnnnnnnnnnnnnnnnnnnnnnnnnnnnnnnnnnnnnnnnnnnnnnnnnnnnnnnnnnnnnnnnnnnnnnnnnnnnnnnnnnnnnnnnnnnnnnnnnnnnnnnnnnnnnnnnnnnnnnnnnnnnnnnnnnnnnnnnnnnnnnnnnnnnnnnnnnnnnnnnnnnnnnnnnnnnnnnnnnnnnnnnnnnnnnnnnnnnnnnnnnnnnnnnnnnnnnnnnnnnnnnnnnnnnnnnnnnnnnnnnnnnnnnnnnnnnnnnnnnnnnnnnnnnnnnnnnnnnnnnnnnnnnnnnnnnnnnnnnnnnnnnnnnnnnnnnnnnnnnnnnnnnnnnnnnnnnnnnnnnnnnnnnnnnnnnnnnnnnnnnnnnnnnnnnnnnnnnnnnnnnnnnnnnnnnnnnnnnnnnnnnnnnnnnnnnnnnnnnnnnnnnnnnnnnnnnnnnnnnnnnnnnnnnnnnnnnnnnnnnnnnnnnnnnnnnnnnnnnnnnnnnnnnnnnnnnnnnnnnnnnnnnnnnnnnnnnnnnnnnnnnnnnnnnnnnnnnnnnnnnnnnnnnnnnnnnnnnnnnnnnnnnnnnnnnnnnnnnnnnnnnnnnnnnnnnnnnnnnnnnnnnnnnnnnnnnnnnnnnnnnnnnnnnnnnnnnnnnnnnnnnnnnnnnnnnnnnnnnnnnnnnnnnnnnnnnnnnnnnnnnnnnnnnnnnnnnnnnnnnnnnnnnnnnnnnnnnnnnnnnnnnnnnnnnnnnnnnnnnnnnnnnnnnnnnnnnnnnnnnnnnnnnnnnnnnnnnnnnnnnnnnnnnnnnnnnnnnnnnnnnnnnnnnnnnnnnnnnnnnnnnnnnnnnnnnnnnnnnnnnnnnnnnnnnnnnnnnnnnnnnnnnnnnnnnnnnnnnnnnnnnnnnnnnnnnnnnnnnnnnnnnnnnnnnnnnnnnnnnnnnnnnnnnnnnnnnnnnnnnnnnnnnnnnnnnnnnnnnnnnnnnnnnnnnnnnnnnnnnnnnnnnnnnnnnnnnnnnnnnnnnnnnnnnnnnnnnnnnnnnnnnnnnnnnnnnnnnnnnnnnnnnnnnnnnnnnnnnnnnnnnnnnnnnnnnnnnnnnnnnnnnnnnnnnnnnnnnnnnnnnnnnnnnnnnnnnnnnnnnnnnnnnnnnnnnnnnnnnnnnnnnnnnnnnnnnnnnnnnnnnnnnnnnnnnnnnnnnnnnnnnnnnnnnnnnnnnnnnnnnnnnnnnnnnnnnnnnnnnnnnnnnnnnnnnnnnnnnnnnnnnnnnnnnnnnnnnnnnnnnnnnnnnnnnnnnnnnnnnnnnnnnnnnnnnnnnnnnnnnnnnnnnnnnnnnnnnnnnnnnnnnnnnnnnnnnnnnnnnnnnnnnnnnnnnnnnnnnnnnnnnnnnnnnnnnnnnnnnnnnnnnnnnnnnnnnnnnnnnnnnnnnnnnnnnnnnnnnnnnnnnnnnnnnnnnnnnnnnnnnnnnnnnnnnnnnnnnnnnnnnnnnnnnnnnnnnnnnnnnnnnnnnnnnnnnnnnnnnnnnnnnnnnnnnnnnnnnnnnnnnnnnnnnnnnnnnnnnnnnnnnnnnnnnnnnnnnnnnnnnnnnnnnnnnnnnnnnnnnnnnnnnnnnnnnnnnnnnnnnnnnnnnnnncttggattacaaacatgtgccaccaagtctggctgcccattatgcatttctgtggcaggcgttgatggctattaaacccaagccttgtatatactaggcaagtacccatccactgaactacagccctagcatggacctcacagggcaatggcctgacatctgggaaacactatcacagagtataataataaaaccgtagcatgcttttcagattgagcatttctgctgggtcacacttggaaaaccttcttattgttatcatgagtatgtgtgcatacatgtggaggtgagaggatgacgtcatagagacagctctgtctcccattctttattgccaatattattttatgttttgtctgcgtgtatgtttgtataccaaagtgcatgcagtgcctgtagagaccaaaagggggcatccctgagactggagttagaagtggctgtgaaccactcactctgtgggtgctgggaatcaaaccccggttctctggcagagcaactggtgctcttaaccaccgaatcaacttctccagccctgcattgctttaatcttttggtcgattcccccaatccaactcataccgccaagtctgagtagcaagtgcctttatctgggagactcactgatcttatttttttttcctttctttttctttctttttttctttttttttttgagtcaggtatgattatttagatggcctcgaactcacagagatccacctccctctgttatgccaggcttttaaaaaacaacatttatttttgaatgcatatatagggctgtgcaaacacagcctgaaggagtcgtttctgattgctcacaacgtggttccagggatggaacgcgggtgaccagcttgaaggtaggtgctttcaccagccccaagaatttattttttaactttatttttttaattaaatgattaaatgacacatgttcattgtgggtagtgcaggtatgcgatggagcacatgtagaggtgacattactgcaggcggtctctctaccatggggattcaactcagaccactgcttcctttaccagatcatcattcttgcatcccccaatcatttctttttgttgatggttttgtttgtttgttttagttttggggggtttttaaagtttttttcgagacagnnnnnnnnnnnnnnnnnnnnnnnnnnnnnnnnnnnnnnnnnnnnnnnnnnnnnnnnnnnnnnnnnnnnnnnnnnnnnnnnnnnnnnnnnnnnnnnnnnnnnnnnnnnnnnnnnnnnnnnnnnnnnnnnnnnnnnnnnnnnnnnnnnnnnnnnnnnnnnnnnnnnnnnnnnnnnnnnnnnnnnnnnnnnnnnnnnnnnnnnnnnnnnnnnnnnnnnnnnnnnnnnnnnnnnnnnnnnnnnnnnnnnnnnnnnnnnnnnnnnnnnnnnnnnnnnnnnnnnnnnnnnnnnnnnnnnnnnnnnnnnnnnnnnnnnnnnnnnnnnnnnnnnnnnnnnnnnnnnnnnnnnnnnnnnnnnnnnnnnnnnnnnnnnnnnnnnnnnnnnnnnnnnnnnnnnnnnnnnnnnnnnnnnnnnnnnnnnnnnnnnnnnnnnnnattaaaggcgtgtactaccactgcctgggcataaccggcctttctgccttatttgtttcgaaacggagtctcatgtagcctgaggtggcctcaaacatgcaatgtagctgcagctgggattacatatgttcaccaccacaacctgttttatgcactgctaagagattaaacctgggccttcgtgctaggtaaggactctattaacagagctacaacctctgcctggtttttagtttttcagacagggctttgcgacatagccctaactggccttgaacatgcaatgatcctcctgcctcggcctcctgggtcctcagattgttgatgctacacccacatatctcagacctgagggttggcagcttgggccatgctctgatttgggagtgacatattaacagtagtttaatacgaatttgaatccaccttacttttttggtggcactgacattgaactcatggccttccacaggcttttacgtgagaaatgttttacctcccttccttgagccatgagcgagcccctcactggtggagtctatgcagctggtctgaaactcataccatcttcctgccccactctccgagtgctgagtgtctacagagctcctgactctgcctgggacgtgatgtctgtgggaccttggctatagaagggaggcagtcacaccacccatttttggcttccatgtcggcaatggagagcttgccatactcacctgatgttgtctgtacagaagggggacggtaaacaaagcaaccactcctacagatgcagagagagagatgggggatggggggtgtcaggttctcctggcaaagggtcagctccgttgagggcttttccactcccgaccaaattcccaaaataacgactctgagactcaatatttcatgaacaaatgcttgggctagcttgggcttgttccctgacaagcccctatctcatttaacccgtttattctattctatgaatgccacatggctggttacctcgtctcagtttcatgagaccctctcatcagcactagggcaaaccctgattctattactctcttcctgcaggagctcgggccccctatttcctccctaagctaatagcccaacagcttttgattgacaggtgatgcttccacacagtgcacacgaagattctctttaccctccatgtgnnnnnnnnnnnnnnnnnnnnnnnnnnnnnnnnnnnnnnnnnnnnnnnnnnnnnnnnnnnnnnnnnnnnnnnnnnnnnnnnnnnnnnnnnnnnnnnnnnnnnnnnnnnnnnnnnnnnnnnnnnnnnnnnnnnnnnnnnnnnnnnnnnnnnnnnnnnnnnnnnnnnnnnnnnnnnnnnnnnnnnnnnnnnnnnnnnnnnnnnnnnnnnnnnnnnnnnnnnnnnnnnnnnnnnnnnnnnnnnnnnnnnnnnnnnnnnnnnnnnnnnnnnnnnnnnnnnnnnnnnnnnnnnnnnnnnnnnnnnnatttttgtagagagggctgaggtcaagtttaagattaggaaagagaatcaagaattatcaaggataaagggagaggtcaggatttacaggggagcagggttcatggtcagaatgaaaatggatgagagagggcaatgcgtgagctgaggtcaagggtcacaatggacggtccgtcggcgggggctgggcagggccaagcattctcactggaaagggttggtgccgtcgccccggtgcacggcctgcagcactttgcggtaaaccctgagagagatggtggcgcagagacccaacagggccaggtgcgcagccacggacacgatgctaaagtgcaggaggcagaggagagaggccatgaggcccgtgaagaccgctcccgacgtcctggtgtccttccagtacaacaggtctgccactgtggaaaagaagacaatgttgggacccgacctgaccaagctcactccctttctgtttgttttttagagataaggtctcactatgaagctaaggctgacttcaaactatgaaaccctggctggtcttgaactcctgattattctaattcatcctttctttttcttagactgagttaagtttgaccggcttcaaactcaagacaaatactcctgcctctaccctttagtgcttcaaggaggtgctaaggatcaaatttagggcttcatgcatgctaggtaaaacccaactgagctacttccctgac

SEQ ID NO: 14 - DNA, 4145 bp, Mus musculus
  misc_feature (4045)..(4045): "n" at position 4045 can be any base.
ataaattcttattttgacactcaccaaaatagtcacctggaaaacccgctttttgtgacaaagtacagaaggcttggtcacatttaaatcactgagaactagagagaaatactatcgcaaactgtaatagacattacatccataaaagtttccccagtccttattgtaatattgcacagtgcaattgctacatggcaaactagtgtagcatagaagtcaaagcaaaaacaaaccaaagaaaggagccacaagagtaaaactgttcaacagttaatagttcaaactaagccattgaatctatcattgggatcgttaaaatgaatcttcctacaccttgcagtgtatgatttaacttttacagaacacaagccaagtttaaaatcagcagtagagatattaaaatgaaaaggtttgctaatagagtaacattaaataccctgaaggaaaaaaaacctaaatatcaaaataactgattaaaattcacttgcaaattagcacacgaatatgcaacttggaaatcatgcagtgttttatttaagaaaacataaaacaaaactattaaaatagttttagagggggtaaaatccaggtcctctgccaggatgctaaaattagacttcaggggaattttgaagtcttcaattttgaaacctattaaaaagcccatgattacagttaattaagagcagtgcacgcaacagtgacacgcctttagagagcattactgtgtatgaacatgttggctgctaccagccacagtcaatttaacaaggctgctcagtcatgaacttaatacagagagagcacgcctaggcagcaagcacagcttgctgggccactttcctccctgtcgtgacacaatcaatccgtgtacttggtgtatctgaagcgcacgctgcaccgcggcactgcccggcgggtttctgggcggggagcgatccccgcgtcgccccccgtgaaaccgacagagcctggactttcaggaggtacagcggcggtctgaaggggatctgggatcttgcagagggaacttgcatcgaaacttgggcagttctccgaaccggagactaagcttccccgagcagcgcactttggagacgtgtccggtctactccggactcgcatctcattccactcggccatagccttggcttcccggcgacctcagcgtggtcacaggggcccccctgtgcccagggaaatgtttcaagcttttcccggagactacgactccggctcccggtgtagctcatcaccctccgccgagtctcagtacctgtcttcggtggactccttcggcagtccacccaccgccgccgcctcccaggagtgcgccggtctcggggaaatgcccggctccttcgtgccaacggtcaccgcaatcacaaccagccaggatcttcagtggctcgtgcaacccaccctcatctcttccatggcccagtcccaggggcagccactggcctcccagcctccagctgttgacccttatgacatgccaggaaccagctactcaaccccaggcctgagtgcctacagcactggcggggcaagcggaagtggtgggccttcaaccagcacaaccaccagtggacctgtgtctgcccgtccagccagagccaggcctagaagaccccgagaagagacacttaccccagaagaagaagaaaagcgaagggttcgcagagagcggaacaagctggctgcagctaagtgcaggaaccgtcggagggagctgacagatcgacttcaggcggaaactgatcagcttgaagaggaaaaggcagagctggagtcggagatcgccgagctgcaaaaagagaaggaacgcctggagtttgtcctggtggcccacaaaccgggctgcaagatcccctacgaagaggggccggggccaggcccgctggccgaggtgagagatttgccagggtcaacatccgctaaggaagacggcttcggctggctgctgccgccccctccaccaccccccctgcccttccagagcagccgagacgcaccccccaacctgacggcttctctctttacacacagtgaagttcaagtcctcggcgaccccttccccgttgttagcccttcgtacacttcctcgtttgtcctcacctgcccggaggtctccgcgttcgccggcgcccaacgcaccagcggcagcgagcagccgtccgacccgctgaactcgccctcccttcttgctctgtaaactctttagacaaacaaaacaaacaaacccgcaaggaacaaggaggaggaagatgaggaggagaggggaggaagcagtccgggggtgtgtgtgtggaccctttgactcttctgtctgaccacctgccgcctctgccatcggacatgacggaaggacctcctttgtgttttgtgctccgtctctggttttctgtgccccggcgagaccggagagctggtgactttggggacagggggtggggcggggatggacacccctcctgcatatctttgtcctgttacttcaacccaacttctggggatagatggctggctgggtgggtagggtggggtgcaacgcccacctttggcgtcttgcgtgaggctggaggggaaagggtgctgagtgtggggtgcagggtgggttgaggtcgagctggcatgcacctccagagagacccaacgaggaaatgacagcaccgtcctgtccttcttttcccccacccacccatccaccctcaagggtgcagggtgaccaagatagctctgttttgctccctcgggccttagctgattaacttaacatttccaagaggttacaacctcctcctggacgaattgagcccccgactgagggaagtcgatgccccctttgggagtctgctaaccccacttcccgctgattccaaaatgtgaacccctatctgactgctcagtctttccctcctgggaaaactggctcaggttggatttttttcctcgtctgctacagagccccctcccaactcaggcccgctcccacccctgtgcagtattatgctatgtccctctcaccctcacccccaccccaggcgcccttggccgtcctcgttgggccttactggttttgggcagcagggggcgctgcgacgcccatcttgctggagcgctttatactgtgaatgagtggtcggattgctgggtgcgccggatgggattgacccccagccctccaaaactttccctgggcctccccttcttccacttgcttcctccctccccttgacagggagttagactcgaaaggatgaccacgacgcatcccggtggccttcttgctcaggccccagactttttctctttaagtccttcgccttccccagcctaggacgccaacttctccccaccctgggagccccgcatcctctcacagaggtcgaggcaattttcagagaagttttcagggctgaggctttggctcccctatcctcgatatttgaatccccaaatatttttggactagcatacttaagagggggctgagttcccactatcccactccatccaattccttcagtcccaaagacgagttctgtcccttccctccagctttcacctcgtgagaatcccacgagtcagatttctattttttaatattggggagatgggccctaccgcccgtcccccgtgctgcatggaacattccataccctgtcctgggccctaggttccaaacctaatcccaaaccccacccccagctatttatccctttcctggttcccaaaaagcacttatatctattatgtataaataaatatattatatatgagtgtgcgtgtgtgtgcgtgtgcgtgcgtgcgtgcgtgcgtgcgagcttccttgttttcaagtgtgctgtggagttcaaaatcgcttctggggatttgagtcagactttctggctgtccctttttgtcacctttttgttgttgtctcggctcctctggctgttggagacagtcccggcctctccctttatcctttctcaagtctgtctcgctcagaccacttccaacatgtctccactctcaatgactctgatctccggtntgtctgttaattctggatttgtcggggacatgcaattttacttctgtaagtaagtgtgactgggtggtagattttttacaatctatatcgttgagaattc

SEQ ID NO: 15 - DNA, 1017 bp, Mus musculus
atgtttcaagcttttcccggagactacgactccggctcccggtgtagctcatcaccctccgccgagtctcagtacctgtcttcggtggactccttcggcagtccacccaccgccgccgcctcccaggagtgcgccggtctcggggaaatgcccggctccttcgtgccaacggtcaccgcaatcacaaccagccaggatcttcagtggctcgtgcaacccaccctcatctcttccatggcccagtcccaggggcagccactggcctcccagcctccagctgttgacccttatgacatgccaggaaccagctactcaaccccaggcctgagtgcctacagcactggcggggcaagcggaagtggtgggccttcaaccagcacaaccaccagtggacctgtgtctgcccgtccagccagagccaggcctagaagaccccgagaagagacacttaccccagaagaagaagaaaagcgaagggttcgcagagagcggaacaagctggctgcagctaagtgcaggaaccgtcggagggagctgacagatcgacttcaggcggaaactgatcagcttgaagaggaaaaggcagagctggagtcggagatcgccgagctgcaaaaagagaaggaacgcctggagtttgtcctggtggcccacaaaccgggctgcaagatcccctacgaagaggggccggggccaggcccgctggccgaggtgagagatttgccagggtcaacatccgctaaggaagacggcttcggctggctgctgccgccccctccaccaccccccctgcccttccagagcagccgagacgcaccccccaacctgacggcttctctctttacacacagtgaagttcaagtcctcggcgaccccttccccgttgttagcccttcgtacacttcctcgtttgtcctcacctgcccggaggtctccgcgttcgccggcgcccaacgcaccagcggcagcgagcagccgtccgacccgctgaactcgccctcccttcttgctctgtaa

SEQ ID NO: 16 - DNA, 27184 bp, Homo sapiens
cactaagcactctcaccacccaatgcctggagtggttgtagtcagtgagtgacacattgcacagtgtgtgccccctggattgggggtgggtgagagacagcccccacagtgagtggcacccctggccagggcctgggacaagtctgtatccaagggtggctctctgcttaggtctgtgtttgtacctgggtgtgtctgtgtctgccctactctgtgcatactcatatatgtgaacccgtgtgtgtgtgtgtagttgtgagtgtgtgtggaagaggctgcatggcagtggaagctaggtgtgtgattcgtgtatctgtgtgcctagagtgccttgttctatagatttggatgccactccaagcaagtcagtgggtctttttgttttttgttttttgagatggaatctcactctgttgcccaggctggagtgcagtggcacgatcttggctcactgcaacctctacctcctgggttcaagtgattctcctgcctcggccccccgagtagctgggattacaggtgcccaccaatacactcagctaatttgttgtatttttagtaaagatggggtttcaccatgttggccaggctggtctcaaactcctgacctcatgattctcctgcctcggcctcccaaagtgctgggattacaggcatgagccaccgcgcccggccaagtcagtgggtctttaggagctgtttcgtacggtgtgactgtgagtgaaccttcgcacacgtgtctgtacggatatctaagaaattcttcaagtaggccgggcacagtggttcaggcctgtagccttagcactttgggaggcccaggtgagtggatcgcttgagctcaggagttcgagaacagcctgggcaacatagtgagacttcgtatctataaaaaatatgaaaattagccaggcatgacagtgggcacctgtagtcccagctactacttggggggctgaggcaggaggatcccttgagcctgggaggtggaggctgcagtgagctgagatcgagccactgcactccagcctgggcgacagagggagaccctgtctcaaaaaaaaagaaaagaaaagaaaaaaagaagacattcttcaagtccacaactctgagggtatcactgtgagagcaggggtcctagctctacccatttgtgtgtgtgtggagatgtgtaagtctatgtagacaaaagtgtgtgtcatttactgtgtttggggtgtgaacacctatgtgatgtgtttgcacaactgcacgtgttttgttctgtgtgtgtgatcgtgtgttcaaataagtcatcttgtcgccgggcgtggtcgctcatgcctataatcccagcactttgggaggcctaggcaggaggaccattgagcccaggaggtccagactgcagtgagccgagattgcgccactgcactccagcctgggcgacagcaagaccttgtctcaaaacaaaagcaaaaacaaaaataaacaaatagtcatcaggtgcctgcacagacaaaggtgaaaggtgtctgcctgttgagatctgtggatagggtgtatatatggacatctcagcctgtctacgtgtgtatctgtctctgtcctcacggcaaaagagaggttggccgggtgtgtggtggctcacgcctgtaatcccagcactttgggaggctgaggcgggcggatcacctgaggtgaggagttcaaaaccagcctggccaacatggcgaaactccatctcttctaaaaatacaaaaaaattaaccgggcgtggtggcacacgcttgtaatcccagctactcagggaggctgaggcattagaattgcttgaacccaggaggtggaggttgcagtgagccaagattgcgccactggactccagcctgggcaacagaacaagactccgtctcaaaaaaaaaaaaaaaaaaaaaaagaggctcagatatgtttctgtctgagagtctgtcagagtttaggaattagtaaatgaatgaatggtgaagatccatttactcaacaaacatttatttatttatttatttattgagacagagtctcgctctgtcacccaggatggagtgcagtggcgcaatctcggctcactgaagcctctgcctcctgggtttaagagagtcttgtgcctcagccaccaagtagctgggattacaggtgtgtgccactgcgcccagctaatttttgtatatttagtagagatggggtttcaccatgttgcccaggctggtctcgaactcctggcctgaagtgatctgctcacctcagtctcccaatatgctgggattacaggcatgagccaccagtcctgcctcatttattcttatattatattatattgtttttattttaaatttttttgtagtgacagggtcttactatgttgactgggctggcctcaaactggcctcaagtgattctcctgcctcagcctcccaaagtgctgggattacaggcatgagccactgtgcctggcttgaacaaatatttaataaccacctattgggtaccacgtgctatgctggggacaaggcagtgaccgggatggttttggccgagctttcacccagctcacaacccaatgagggagacaaacctatccccagacaatgatgagcccagattggcagagttggagggagggaccccaggagagggggccttgactcagcctggagatcagggagggcttcctggaggagaggttatgggagttaagacttggaggaaaagactatgagccacaggaagcgaagggaagagtgacccaggcagagggaaaagcacctgcaaaggcctgaagtccagggagagaggccaggcatctggaacacaacggggagaggagagacgagactagggcaccctcggagcaggtcgttcagggcctcaggagccatggggaggagtataatgcaggatgcaggggtactgggagggtcaagctaacagtgtccaatctgggttactctgcttccctgaaactccagggacatctcctccaggaagccctagggattgctcagtgtggagcggctcagccacccagtcacactcactattcaatgctgagcactgaggaggcagccgttactaaatcagcctggatttgccctcccagaggtcacagtcacaacagtcaaacacacacctgcacgtgcacactcatgaacgtgcccctcccctcctctggagcctcagaaacccacagaccttgttcctcccagggggtgtccctggggccaaagcttctgcactaccagggggcttgttggaaatgcaaaagatggctgggcacagtggctcacacctgtaatcccagcagtttgggaagctgaggcaggcagatcatttgaggtcaggagttcatttgaggttgggagttcaagaccagcttggccaacatagcgaaactctgtctctactaaaaatacaaaaaaattagccgggcgtggtagcacacgcctgtaatcccagctacttgggaggctgaggcaggagaatcttttgaacccgagaggtgaaggctgcagtgagccaagatggcaccactgcactccagcctgggtgacagagtgagtcttaaaaaaataataataaaataggctgggcgcggtggctcacgcctgtaatcccagcactttgggaggctgaggcaggcggatcacctgaggtcaggagttcgagaccagcctgaccaaaatagtgaaaccccgtctctactaaaaatacaaaaaaatttagctgggcgtagtggctaacgcctgtaatcccagctacaggctgaggcaggaaaattgcttgaacccaggggtgcagaggttgcagtgagccaagatggcaccattgcactccagcctgggcaacaacagtgaaactccgtctcaaaaaacaaaatacaaaaattagccaggcatggtggcacacacctgtaatcccagctactcgggaggctgaggcaggagaatcacttgaacccgggaggcagaggttgcagtgagctgagatcgtgccactgcactcaagcctgtgtaacaagagtgaaattccgtctcaaaataaaataaaataataaaaataaaaagatgaccacagcagatctgctggctctccaggcaattcgtgatcaccacgaattgagaagcgctgctctcaggcttaacccccctgtacctcagtttccttttctgtacaaggagatcaaaacagaatccatgtagaggactgacgtggagtgaggcttaactgagataatgagtgtgaaagtgctaagcacagcttcctaagtgcttgttttcagcagctcctcttcctcttttctatttttttatttttattttttttggggggggaacagggtctcgctctgttgcccaggctggagtatagtggcagagtcatagctcactgcaacctcaatctctcagggctcaagtgatgcccgtgcctcagcctcctgagtggctgggactacaggtgtgtgccaccatgcccagctaatttttaaatttcttgtagaggttgggggtgggtctcactatgttgcccaggctggtcttgtactcctggcctctggcgatcctcttacctaggcctcccaaagtgctgggattacaggcgtgagccaccacacccagccctcctcctcctctgtattattaaatttcagagctggaaagaaatttcgaagaccgccatcactcaaccttcttgctctacagatgggggaactgaggaacagaggagcagaggtttggccagaggaaggtgggaaggacgtggtgtggctggccttcacagactctgccgggggctgtttacaggatactctgaggaaagccaggatgggcactgatacccacctccaccctgcgggaggcagaaggctaaggctcccccagccgtctcccccaagcagagctgagcccttgggagccagggcagagatgcaaccctctcccccatgctcaggtcctcctcctcctggaagctctccttccaagaggagcctcttattttattttttattattattatttttgagacaaggtctcactttgtcacccaggctggaagtgccgtggcatgatcatggctcactgaagccttgccctccccaagctcaagtgatcctctcacctcagcctcccaaatagctgagactacaggcacacgccaccacccctggctagtttttgtatttttagtagagatggggtcttgccattgtccaggctggtcttgaactcccgggctcaagtgatctgcccaccttggcctcccaaagtgctgggattacaggcatgagacactgagcctggcaaggaatgagccttatggagaagaacttgatttacccactccatgctctgcaggcaggtgtgtcatgtctgtgagtgcaggtgtgtgtgtgtgtgtgtatgtgtgtgtgtgtgtgtctccagggccaatttctcccttaggcccaggggcacagtgcctagggcccatgataaatttaaccgacccacggatatgggtcaggagggtatacatgtataaagttcaggaagactttgttttagtaacaaaacgagcatgtacaatctgtcaggagccttatgatatcttcccaccagtctcatgagtgggcactacatcttgttctcctttgtcgggtagggaaactgaggccccggatgtcctagctcaagttcaccaagctacttggtgatagaagcggaacataagcctaggccacctagcttctgggtctgcgatcgtgtgaggataaatgcccagtgtgttcgtgaacatgagcatccctgtgtgaataaattgacatacataaacccatttaataaatttcaaagccaggcgccgtggcttactcctgcaatctcagcgctctgggaggctgaggtgggaggatcgcttgaagccaggagtttgagatcagcctgcaacaaagtgagaccctgactctaaaaacatttttttgaataaaaaaattaggctggacacagtggctcacgcctgtaatcccagcactttgggaggccaaggtgggtggatcacttgaggtcaggagtttgagaccagcctggtcaacagggtgaaaccctttctctactaaaaatagaaaaattagccaggcgtggtggcacatgcctgtaatcccacctactggggaggctgaggccggaaaattgcttgaatctgggaggtagaggttgcagtgagccaagatcatgccattgcactccagcctgggcgaagaaacgagactctgtctcaaaaaaaaaaaaaaaaaattagtcaagcatggtggtacgcacctgtagttgttagttacttgggaggctgaagcaggaggattacttgaggccaggagttcgaggttacagtgaactatgattgcatcactgcactctagcctggatgacagagcaagatcctatctcaaaataatactaatagttcaaggaacagactttgaagcctgacaccctgcatggtgttattccagctttgctacttacttgctgtgtgactctgggtgaataacttaacctctctgggcttctgtttcccttcctgtaaaatgatcatttgtacctcacaggagtgttgtgagaattaaataagttaatataagctcttgggaagaattagctcttgttatggttgtgtgaagagctttacacgagtccctctgcaggatgcatggttgttggtctgtgtgtgtgtatatatatatatgtgtgtgtgtatgtgtgtatctatgtgtatatgtgtatatgtgtgtgttgctctcttgatctctgagtgttgtgtgtgtgtcaatgtgtgagatcatatatgcacctttagtaaagatctaggggtctctgtgtgttttgggggtctgtacctgtccttggctgtacacctgaaccctacgtcttcttgtgtgtgtagggatgtgtgtcatgtgtgttgataaccatatgacagtgtgtgtttccacatgccagtgtgtgtctgtgaagctgtttctatgtggctgtgggtgattgcccacgcgtgacctggtgagcggctgtgtggaagtctgtgttgcctgtgtcgggtgtggagtctctggccagccagggtaggtctttgcatgtttcctttattccatggaggaggagatgaggggcttggatgagacagaagaatgaggggtcactccctgtctgatgctggggccgagtcactgcctactagtggctgctgtgtcatctcccagtctctgtccctccctcctggctggtggcagacagagggggcgtggaggaacagggcagggggtgggcttgaggctggacttttgtctggaaacttgaacctccacctatgccccccacgtccctctagtcttccacatctccctacaccctccctactattggggcagggaatcaggactccctgaaaattaagaaccatcgccttggctctgccacaggcttgctgtgtagcccggagacaggccctgcccctctctcaacctgtgaaattcaatgttttaaaagtgcttcttcctttgtgcccagggctgggccaggctgtgcactgggagggaagtgctgggttctctgaggtttgtgaaatagctggtagcacccttcccagtgggtgcttaagagttgggggctgtagcatctgaaatacccaagtcagtgcaggcatagtggctcatgcctgtaatcccagcactttgggagaccgaggcaggcggatcacctgaggttgggagttcgaaaccagcctggccaacatggtgaaacccccatctctattaaaaatacaaaagttaggccgggcacagtggcttacgcctgtaatcccagcatttaagaaggccaaggcgggaggatcacctgagtttgggagtttgagagcagcctgaccaatatggagaaactctgtctctactaaaaatacaaaaaaactagccaggcatggtggcacatgcctgtaatcccagctactcgggaggctgaggcaggagaagcacttcaacccgggaggcggaggttgcggtgagccgagatcgtgccattgcactccagcctgggcaacaagagcaaaactctgtctcaaaaaacaaaacagaacaaaacaaaaattagccaggtgtggtggcgcacacctgtaatcccagctactcgggaggctgaggcaggagaatcacttgaacccaggagatgtaggctgcagtgagccgagattgtggcactgcactccagcctgggcaacagagtgagactctgtcaaaaaaaaaaaaaaaaaacgtcagattcatgaaccccatttgctaagaagatttgctcaggtagtcacctgtacccctgtgagccaagattgcaacagtacatgctaagagcagtaagaaggagtttgtaaagcttagaaagacctgacaggccaggcgctgtggctcacgcctgtaatctcgacacttcgggaggccgaggcaggcggatcaccaggtcaggagttcaagaccatcctgaccaatatggtgaaaccccgtctgtactaaacatataaaaattagcttgacgtggtggcccgcgcctgtagtccagcaactcgagaggctaaggtgaggcggaggttgcagtgagccgagatcgccactgcactccagcctggcggcagagcaagactccgtctcaaaaaaaaaaaaaaaaaaaaaaaaaaaagacctgacaagtgaaagctactaatattgccattatcatttaaaaaaaccccagacacaggtttttcagggagtttcatccaaccaggcaggtctcagaaatcagaaaagaaatggaaagggtaggaaatctggagtttgacaattctgagtttgaatttcttgtgatgggatcttgggcaagtcatttaacctccctgagtatcatttttttcttttataaaatgaagatttttctctcttaaccttccagagctgttttaaggattacaaatcttctactgaaaggcgtagcacaggagctgtgcttggcaagtgccaaatacaaggcattaattattattattagaattaataataatatcccctccctcttacacattctttgtctccgggtggattaaaaggtggaaggagaggctaccaacaccatcagaagagaggcttctctctaagtttcatttcccatctcctccaaatccgcatccctcccaaacgccggacctgtaaggccagcagggtccaagacacacatcctttgcccagcggggaagattaaagctaaagctcagagagggaaaacatttcctaagctcgcacagcgaatcaggacagaaaccaggacgagcctcggaatccctccattacctccactttcacctgagcatcacagcccgctcgggactcagtttccccacctacgtgaccacaccacactaatcagggtctccttttggagatctgctcttcttctcgaatgggggcgctgcaccatcggtagaacagggtaggtgggggcgccagaggtgaaggggacctgcaggctggggtcttccccgcccgggtcagcggggtccctgcggggctagtctaagcgcctattattaccagcccccggggcggcgttgcactgcgcaggcgcgggcggggcgcgggcgcgcgcgcgagcgagcgagggattccctctgacgtcattgctaggataccaaacaaacactccgccgcgccggccgagctccttatatggctaattgcgtcacaggaactccgggaaggcggggccgggatcccctcccgccgagtggcccggaacgcaacccccgagacccccagggccccgagggtcatgcaagtgaccagatcgagtctagaacagacctcttgctggacagtgcgggactcgatttggcggggccggagatttggggaagtttgtccagcaaggggcgggtgacgtaagcaggggggcgggtcccgggcatataaatacaggctggcgggtctgtgcttcattcataagactcagagctacggccacggcagggacacgcggaaccaagacttggaaacttgattgttgtggttcttcttgggggttatgaaatttcattaatctttttttttccggggagaaagtttttggaaagattcttccagatatttcttcattttcttttggaggaccgacttactttttttggtcttctttattactcccctccccccgtgggacccgccggacgcgtggaggagaccgtagctgaagctgattctgtacagcgggacagcgctttctgcccctgggggagcaacccctccctcgcccctgggtcctacggagcctgcactttcaagaggtacagcggcatcctgtgggggcctgggcaccgcaggaagactgcacagaaactttgccattgttggaacgggacgttgctccttccccgagcttccccggacagcgtactttgaggactcgctcagctcaccggggactcccacggctcaccccggacttgcaccttacttccccaacccggccatagccttggcttcccggcgacctcagcgtggtcacaggggcccccctgtgcccagggaaatgtttcaggctttccccggagactacgactccggctcccggtgcagctcctcaccctctgccgagtctcaatatctgtcttcggtggactccttcggcagtccacccaccgccgccgcctcccaggtaagtttttgatagtaggggtgctgctttgtaggttttattttttaagtcaagggtgaaaagaataaaccccaacccccacaaaaaggcgcatcagaaccctagatctgagatggaaaaggctcacagcgcactttgcaaactgcaaagagtcgggagatgtttgcaattggttgcgtgcgtggagcgcaaggagggaacgcggcagggagggtaggctttggggcgaggtgggggtggggtgggtaatgcgctgctcaatgcaacgtgtatgcggtagcggggctgagaactttgagccggccccgggactgccccctgctcgggtcccagacctgaagctagcgcagttaggcaggtgggggaaatcccggggaagcttccagcagtctcttttcctttcctcctccttcggagcgcccacttcggtgccgggtcgccctccacccatcgggaagaggggcctcgaaccctcagccgcgctgcctccgcctcctgcgcggagacgtaacgggggacccgtgcgtaacggctgacgcgctggaatcctccgtctgacgcggggcacgcacggcgcgcggcgcccccttcgtccgccccgcccctgacgtcccgggagcgttctattttggaacgccggggccacgttgctaagggagggggcagcccggcgtttcgattggccgccggggcgcacgccttggccaatcagctttcccttcctatttgtagggtgcattttccttcccccctctctgtccccggaacccgtggttccttggcggctgggtctcttttcggcgcctctagaggcagagggaggggatccctgtcgtgacaagagcgcctgtctgcgacccaatggatctgcgaggcccttgcggggatctagtccctgggctctcaggagaagggggtgtctgcttgtgtgctggcgtttcttggagagatacggtggctgtcaccctcttctccaggcacacacagacacattcccactccctctgctcctcatgcccggttcctccggtgtgtcccaagacaggactagaaccgcgaaccgaagggcaaccagccaggtggtctccaggagctccgccccctctgggttcccaggactctgattggtcggcgagccagcccttccctcaccacgccccccgagagagtagttaagccttcagagcagttccaggagtccatttacgggaggggggagatgagcgctgctgaggcttgggggctcaggtcccgcaccattccccctccgcgacaatctgagagagctccagtggttacttttatctacctgtccgttcaccctaaactgtcactcgtcagtctcactctgagaagagacagtaacttgaaacgttgttctaaactcctaggcccgtcccccaaacacccttttgactgggacccccgcccctgcatgggacctcgcgcagaggggggtgtgtatgtgtgtgagtgtagaggaaggcttggcctaaggcctctccttctccctccccttgcctctggggtgggggtggggtgttgtggctgtgtgtgtggctgtggctccgtcccgggggttctgtcacccggctgtgtccagcctcctctccaccccccatacctaagagtcaccaacccggggtgtgattcaccacccgctggaaccgtgcaacctttccccgaggaagaaggaggaggtagaagccagttgagcagaaatcctctcattaaccactgcgtcacggtgtagtggaagggtgggtgttgtggctttttccctgtgacacacacatccacactcgctcaccctgtgctcactcacggggtcggtgtgtgttatgtgtgttgggtgtgtgtgtgtcggtgtctttgtttgtgtgtctacgcctgtgtgtgtatgtgtcaccccgtaggagtgcgccggtctcggggaaatgcccggttccttcgtgcccacggtcaccgcgatcacaaccagccaggacctccagtggcttgtgcaacccaccctcatctcttccatggcccagtcccaggggcagccactggcctcccagcccccggtcgtcgacccctacgacatgccgggaaccagctactccacaccaggcatgagtggctacagcagtggcggagcgagtggcagtggtgggccttccaccagcggaactaccagtgggcctgggcctgcccgcccagcccgagcccggcctaggagaccccgagaggagacggtgagtaagggacatcagaacttggcctgggtagggggaagcaagagaggcaggaagtttcttatgaatggaggggggctccactaaggcctcagtgttacagaaaccccaagatccttgctacacgagcgaggaccggaggcttgttttttggctcttgggggttctgaaagaagtagaggttcgggatgggtggaggagtgctgtatccccaaatctcatggcctctatctccctgactcagctcaccccagaggaagaggagaagcgaagggtgcgccgggaacgaaataaactagcagcagctaaatgcaggaaccggcggagggagctgaccgaccgactccaggcggtgaggacaggccctggggtgggagaggggatgttgaggggagctctctccccattctctgccccctctccacctgtacccttatcctgggttgagaactagacgttccacacatggaactaggtactgctgtggccagactgggtagcccagggcacaaacacagacccccatggacttaagtcaactcctggtcccccccccatttcctgaccccacggactactctcctagccttcatttcatcccaaggggccacatggggcccttgaggagaggggcgcccccatcatttctcccatctggtcttcagcaagtaacaacccattttgcctcagtttctccatctctgcaaaccctcatcaaatctcccgggctctttctacccttaacactctggaaagcctgtgaaatgaaattattccacctcctgccctagccacccacagctctcctggtgctggtggcatcccccaaaacccactcccttcctacgtcctcccttggtctgagagttccctgctgtatgcctgcagggtgagctgttactccttgagggaacaagggaattgtcaactttccttctctactttttctcttccccgggaggtagagagggaggggtaatagaagggaacacattaaaaacacataacagtggctcatgcctgtgatcccagcactttgagaggccaaggcaggaggattgcttgagcccaggagtttgagaccagcctgggaaacatagggaggacttgtctctaccaagaaaaaaaaaaattagttgggcatggtggtgcacaccactgtggtcccagctactatggaggctttagtgggaggatcgcttgagccgaggaggtccaggctgcagtgagccatgattgcactattgcactccagcctgggggacagagcgagactctggctcaaaagcaaaacaaaaccaaccacataacgattgttcattcattcaacaaacctcctgcacaccagaaacttccccataaacctggccccttctgtaccatcctttggacagatgggggaaactgaggttcctggaaggcaagacccttgccccaactcccatggccaccaggactccatctcaggaggtgttttttctcagcccggggctgccttccagcagcaagtccaagggagccatgacccgagtttcccggtcactgacatgcttttttctccttcctctctctcttctgtgacctggcctccctggcctcaggagacagatcagttggaggaagaaaaagcagagctggagtcggagatcgccgagctccaaaaggagaaggaacgtctggagtttgtgctggtggcccacaaaccgggctgcaagatcccctacgaagaggggcccgggccgggcccgctggcggaggtgagagatttgccgggctcagcaccggctaaggaagatggcttcagctggctgctgccgcccccgccaccaccgcccctgcccttccagaccagccaagacgcaccccccaacctgacggcttctctctttacacacagtgaagttcaagtcctcggcgaccccttccccgttgttaacccttcgtacacttcttcgtttgtcctcacctgcccggaggtctccgcgttcgccggcgcccaacgcaccagcggcagtgaccagccttccgatcccctgaactcgccctccctcctcgctctgtgaactctttagacacacaaaacaaacaaacacatgggggagagagacttggaagaggaggaggaggaggagaaggaggagagagaggggaagagacaaagtgggtgtgtggcctccctggctcctccgtctgaccctctgcggccactgcgccactgccatcggacaggaggattccttgtgttttgtcctgcctcttgtttctgtgccccggcgaggccggagagctggtgactttggggacagggggtgggaaggggatggacacccccagctgactgttggctctctgacgtcaacccaagctctggggatgggtggggaggggggcgggtgacgcccaccttcgggcagtcctgtgtgaggattaagggacgggggtgggaggtaggctgtggggtgggctggagtcctctccagagaggctcaacaaggaaaaatgccactccctacccaatgtctcccacacccaccctttttttggggtgcctaggttggtttcccctgcactcccgaccttagcttattgatcccacatttccatggtgtgagatcctctttactctgggcagaagtgagccccccccttaaagggaattcgatgcccccctagaataatctcatccccccacccgacttcttttgaaatgtgaacgtccttccttgactgtctagccactccctcccagaaaaactggctctgattggaatttctggcctcctaaggctccccaccccgaaatcagcccccagccttgtttctgatgacagtgttatcccaagaccctgccccctgccagccgaccctcctggccttcctcgttgggccgctctgatttcaggcagcaggggctgctgtgatgccgtcctgctggagtgatttatactgtgaaatgagttggccagattgtggggtgcagctgggtggggcagcacacctctggggggataatgtccccactcccgaaagcctttcctcggtctcccttccgtccatcccccttcttcctcccctcaacagtgagttagactcaagggggtgacagaaccgagaagggggtgacagtcctccatccacgtggcctctctctctctcctcaggaccctcagccctggcctttttctttaaggtcccccgaccaatccccagcctaggacgccaacttctcccaccccttggcccctcacatcctctccaggaagggagtgaggggctgtgacatttttccggagaagatttcagagctgaggctttggtacccccaaacccccaatatttttggactggcagactcaaggggctggaatctcatgattccatgcccgagtccgcccatccctgaccatggttttggctctcccaccccgccgttccctgcgcttcatctcatgaggatttctttatgaggcaaatttatattttttaatatcggggggtggaccacgccgccctccatccgtgctgcatgaaaaacattccacgtgccccttgtcgcgcgtctcccatcctgatcccagacccattccttagctatttatccctttcctggtttccgaaaggcaattatatctattatgtataagtaaatatattatatatggatgtgtgtgtgtgcgtgcgcgtgagtgtgtgagcgcttctgcagcctcggcctaggtcacgttggccctcaaagcgagccgttgaattggaaactgcttctagaaactctggctcagcctgtctcgggctgacccttttctgatcgtctcggcccctctgattgttcccgatggtctctctccctctgtcttttctcctccgcctgtgtccatctgaccgttttcacttgtctcctttctgactgtccctgccaatgctccagctgtcgtctgactctgggttcgttggggacatgagattttattttttgtgagtgagactgagggatcgtagatttttacaatctgtatctttgacaattctgggtgcgagtgtgagagtgtgagcagggcttgctcctgccaaccacaattcaatgaatccccgacccccctaccccatgctgtacttgtggttctctttttgtattttgcatctgaccccggggggctgggacagattggcaatgggccgtcccctctccccttggttctgcactgttgccaataaaaagctcttaaaaacgcattcgccaggctacagtgtttatttcctcctaacacccattgcctggcttccttttagtaagagaggatgaggttagattgtcgaaggactacacacacacagagatcatacacccatgcacacacacacacagacacacacctatgcaggaactccttctagtcaatgggtctacagcaggataaaaggaaggcagacagtcaggaggacttcctgtactcgcaggcagtgcctcctactagaaaaagtaagtggctacagctgggcgcagtggcttgcgcctgtaatcccagcattttgggaggccaagatgggcggatcacttgaggtcaggagtttgagaccagccttgccaagatggtgaaaccctgtctctacaaaaaatacaaaaattagcctggtgtggtggtgcacacctgtaatcccaggctacttgagaggttgaggcaggagaatcactttaacttaggaggcagaggttgcagtgacacaagattgcaccactgcactccagcctgggtgacaaagtgaaactgtcaaaaaaaaaaaaaaaagtaaggggtcagaaggttagcctgcaggtgtgggatcacagaggtctcctagtgatggagcttgtatgctctatgggttaaaaacagacgctaaggagataaactatacacagaagaagcttaatgggctgtgcacagtggcttgcacttgcaatcccagctctttcggaggccgaggtaggaggctaggagttcgagaacagcctggggcaacatagtgagacaccccccaccccaacccatctcattatgttgagaaaaaaaaaaaaaagaggatcttgagaaacttgcacagcaaactactaaagaccactcaggctaggaatgaggcgtcatcttggattttttacaaactacaactacaaaaaacaattattttacactgaagatgtgtttccttttgttttccatatgaccactattggggccaacccaagactgactgaagcaaatatatgaccattttttttttttacacatagagtggagccatccccattgcaaaatcctagccgtctcttatttgcataacagcaagtcctctgggaattgaggtgagggtccaggggtcgctcagacgctttggtaaatcaataagcaagggaatttgtcatggtggaatccatttattaattcactcaaaaaaatgtgctaagcacctacccaactgtgctgggagttggggacactatagggactgagcctcaggtcttgccctcctggggctcacagtccattgggggacacacaccgttgccagtcagggacaacctaaagtggattgggtttgggaagcccatggggctagggaagcacagcagggacacctagcttggactgggagtcgggaaaaacttcctggcggaggggacagctgagctgagtcctagaggaggatagagagtatagaaagaaatagaaaaaggccaaggccaagaaaatagcacagccatagatctgttggtggggagaaggcttgatacattgagaacgcttagagggtcgggtgcgatggctcatgcctgtaatcccagcactttgggaggccgaggtgggtggatcacctgaggtcaggcattcaagaccagtctggccaacgtggcgaaaccccgtctctactaaaaaatatatatatatatatacaaaaaattagctaggcatggtggtgggcacctgtgatcccagctactcgggaggctgaggcaggagaatcgcttgaacctggaaagtggacattgcagtgagctgagattgtgccactgcactccagcctgggcaacacagcgagactctgtctcaaaaaaaaaaaaaaaagaaagaaaaaaaagagaaaactcagagattcgtggagactggaaccacgggtgtggagagaggggttagtagagaccagattctgcaggtactataatgacattcccaggctaaggagtttagatcttttcttcagggcactggggagctattgcaggttttgaacacgagaggggcaggggcaggtttgtgatttaggaaagacccctctggccccagactgagcgtgactggaagggagaggagtgagactgagcaggagaccagggaggaagtggggtggggaccctgcagggtggggtgaggaggagtccagaacagggccagggacatgggacagagaggaggggaaggattcaggagacactcgggaggcaggacagttgggcttggtgagcagccggcttgggaaggaaaatacagggcagtaataaatagcatgggtcaagtggtctgagtgaggctgggagtggtggcacgcacctatggtcccagctactcaggaggctgaggtgggaggattgcttgagcctggaagtttgaggctgcagtgagctatgatcgtaccgctgcactccactttcggtgacagagtaagaccctgtctcaaaaaaaaaaaaaaaaaggaaaaaaaaaaaaagacactgcctatgagttaaccctgctctacaaggagcagtttttaaagtaaaattaaaaaaaaaaaaaaaaaagaaagaaagaaagaaagaaagagagagaaaaaagaaaaaaggctgggttgccttggacaacagacttcatctccctgagcctccatttcctcatctgtagaatgggggctgttaagaggagttgcaaggcttgtgcatgccagcagtaagtgcagagtgacggtgcaattatcattacccccatcatctttattggggtcagcctgaaccctcgatatcccataatattcacccccatccttcaagggtctgccctaatgttcccatgacacccgaccagctcagctctccttatgagagggcctcacttttctattccctttgcagccgttatcccctttgtagttgttaattaagtgtgtaattacatgatggcttaatgtttgtctcccccactgggctgactgcaccaggagaccaaggccagggctgtcacccaccgctgcgtcctcagcaaatgcttgtttgatgagtgaatgacagatgaacaaatgggcaagtatttgactgattaatcacggcatgcgtgattaaataaatgagtgagcaaacgactgaatgagtaagcaattgaaggggagagatctaggataatttccaaactgccaatatcccagaactgggtagatgactttttctccgtcttttggagtgggtttttatactccggagggggaaataagtaacgacaatcagagatcggagtgacagagaatgagtttgcgatgcggaaggccgcagcgacctctccaggtgcaggctggaggagcgcctcccgggcaacaagcaaaataagtccggttcgataagtaagattcaaggcgcttagttactaccgcccgaaaggtggaattgaaccactctgtcgctagacagctacaggtttgaagcctgcaccccagaccactgaggatcatccgggcaggacaaccttcttcccgcgcagctatataaggatcgcaaaagcttaccttttagagttatggtcgcgtcctttggaaaggtgtgagatggttgacttcaagggctataagttctccccactcatttatcgtgagagatgtccttgtaaaacgttgccttcacttcatatagtatgaatcatcctcgctccccaaaccgtctcatttacatagcgccacgcattctgggaagcagcgtttgagcacctggcaagctgttaaagggcccaggaccccctttttccaaaatgaaaagtcagctttttaagaggagagattcatgattcggcattcagaagcgccttctcggaaaattccgaattctctttctgcggaggagtggtgagtgggttcctgttagagtctgattcaccctggccccaaaggcgctgagcaggcggctatagggctggtgcgacacctgctgttcttttatggaattgcgtaggccgatggagctccgcgttcattcaaacgtttattgagcgtctactgagtcccaggaactgtctcggtgctggtgacgacagacatcctgtcccgattgagtttaaacactagacataaccaatttctgcacttgcgttttatggttggagaaactgagacagactcagaaacggatagtaccatattccggttaaaacagcccatccacttagggaaatcgaacttgtgttacaatttttattacaaaaaaggtgattcttttttcttaaatttttacatatttaggaggtacaggtgccgatttctacatgcatatgttgattgcatcgtggtgaaatctgggcttttaggtgtactcatcacgaaaaattattcaatattctaagtcagtgattctttgacaataccattctcctgcatgaaactctcccatgacttccatttcagagtaaaagtcaaagtactcaccctgctttacaaatccctgtaatccagcccctttggtccctctgaccctgtctcacatactcctcttcccttggatattattggatttaggcacacagatgtcttgctgcacacatggatcatgctaccaccacagggactttgtgcttgccgatcccctagcctggatctcctcttcacatgttcccatggctcatcgcctcccttcactctgtcatctgatcaaatgtcaataccaaaaactcactgagtgaccagcactcagtggggccttccctgatcccagtttaaaatagcgagtggcggccgggcgcggtagctcacgcctgtaaccccagcactttgggatgccaaagcgggtggatcacgagatcaggagatggagaccatcctggctaacacggtgaaaccttgtctctactaaaaatacaaaacattagctgggcgtggtggcgggcgcctgtagtcccagctactcgggagcctgaggcaggagaatggagtgaacccgggaggcggagcttgcagtgagctgagattgctccactgcactccagcctgggggacagagcgaggctccgtctcaataaataataaataaataaaatagctagtggctgggatcggtggctcagggcctgtaatcccagaactttgggaggccgaggcgggtggatcacctgaggtcaggagttcgaggccagcctggccaacatggtgaaaccccgtctccacgaatgatacaaaaattagtcaggcatagtggctcacgcctgtaatcccagctactcgggagtttgaggcaggagaaccgcttgaaccggggaggcagaggttgcagtgagctgagatggtgccattgtactccagccttggtgaaaagagcaaaactccatctccaaataaaagtaataataataataaataaaataaaaatttttaaaaagcgagctctgtcactctatccccttaccctgctagacatttccccaccactctgatcaccacctgccattttctgtgtctatttgcttaccgtctgtctgcttctgtagaatatcagcaccatgaaactatgcactttatttttgatcattgctgtatctctagtgcctaaaaagtgcttgagaacatagcagatgttcagtaaatgtttgtggaatgaataaaagaatatcatcactgtctttttttcattcttcttccagacaggatcttactttgtcacccaggctggaatgcagtggcgcaaaaacggctcactgcagcctcgacctcccaagctcaagtgatcctcttgcctcagcctccctgggatgacaggcatataccatcacgcccagctaattttaattttttttgtagaaacaggggcctcactttgttgcccagactggcctcgaactcctggcctcaagtgatgcttctgccttgggctcctaaagtgctggaatttcacgcgtgagccacagcacctggcctcactatccttctttcagcctcagttttctcatttgtataaccagactagtacaactgatctcactggagaaatcatgatataaaattctgacactggctgaggcaactgggaggagctcagtaaaggctgtttctgctgggcacggtggctcacacatgtaatcccagcactttgggaggccgaggtgggtggatcacaggagattagaagttccagaccatctggcaagcatggtaaaaccccatctctactaacaattcaaaaagtagccaggcatggtggctcacacctgtgatcccagctactcgggaggctaaggcaggagaatcccttgaacccaggaggctgaggttgcagtgagccaagattgtgccactgcactccatcctgggcgacagagcaagactctgtcaaaaaaaaaaaaaaagttttttttttttggctggaattacaggcgcctgcccccacacctggctaatttttgttttttgtttttttaggagagacggggtttcaccatgttcaccagactggtcttgaactcctgacctcaggtaatccaactgcctcagcttcccaaagtgctgagattacaggcgggagccactacacctggccaataaaggccgtttcagtcttcaatctgttttgagcttggaggctttagtcattcccagacccaaaatctcaatcagaccctcttccaccactttttgtgatagatcaataaacattttgtcttatgggaagtttaactaagagtatctttagaaagttttggacaggcgctgtaatcccagcactttgggaggccgagatgagcggatagcttgagcccaggagttagagacaagcctgggcaacatagtgagactctgtctcaaaaaaaaaaaaaagaaagaaaggaaaagaaaaaaagaaaaaaaaagtattccctctgcttggcaaatccagattcaagatatatcccctaaaccctctttgttttaattagatagttgctgctaggcacctctgtatacaaattctgaggatgtaaggactccttggaacaccgttatctgtctcctaatatgtgacgtgtgtatgacgaacaagtgagttttttttttttttgtttcttttttttggttttttgttttgagacgcagtctcgctctgtcgcccaggctggagtgtagtggcgcgatcttggctcactgcaagctctgcctcccaggttcacgccattctcctgcctcagcctccctagtagctggaactacaggcgcccgccaccactcccggctaatttttttgtatttttagtagagacggggtttcaccgtgttagccaggatggtctcgatctcctgacctcatgatctgcccgcctcggcctcccaaagtgctgggattacaggcgtaagccaccgagcccggcttttttttgagatggagtttccctcttgttgctcaggctggagtgcagtggtgtgatctcggctcactgcaacttccgcctcccgggttcaagcgattttcctgcctcagcctcccaagtagctgggattacaggcatgcaccaccacgcccggccaattttgtatttttagtagagacatggtttctccatgttggtcaggctggtctccaactcccgacctcaggtgatccacctgccttggcctcctaaagtgctgagattacaggcgtgagccactgcgcctggctgcacaaacattttaaacgtcaatatttttgtgtttatttttactattgtcttctatttctggcaagcaatactggtttctggtggcaaggtaacctttcttcttaaaatacatttgttattatattattaaatattaaaccaattttcaagaaaaatattagataaatagcagaacaggttgtagaaagatgaaggtcatgtggggaatgactgaggtttgggaaacaatattataactccttactgtgcatttattatatgccaggcccaatgccaagggctttacatgtaggtatagttatggttgacagttttcttctttttcttttctttttttttgaaacagggtcttgctctgtcgccctgtctggagtgcagtgacgcaatctcagctcactacaacctccacctccttagttcaagtgattctcctgcctcagcctcccgtgtagctggtcttacaggtgcccaccaccacatccggtatttttagtagggacgaggttttaccatgttggcgaggcttgtcttgaactcctgacctcaggtgatccaccttccttggcctcccaaaggctgggattacaggtgtgagccactgcacctggcctctttttttcttacttaatttttttgtagagatgaggtctatgttgcccaaacttgtctcgaactcctggccttaagtgatcctccctccttggccttccaaagtgctgggattgcagacgtgagccatcgtgcccggcctaataagttttccatttgaggaaactgaggctttgagagatgaagtcatatgctcaaggtcatacagcgaaggggtagtagagccaggattcaaacccaagtctgtggatctttagacctcagtgttctcccagtctccccacgggtccctttgcttcatcctttccgagtttagttgtcttttttgttgttgttcttgttgttgctgttttttgatagagtctcgccctgttgcccaggctggagtgcagcggcatgatcctggctcactgcaacctctgcctcctgggttcaagtgattctcctgcctcaggctcccgagtagctgggattacaggtatgcgccgccacacccagctaatttttgtatttttagtagagatggagtttcatcatgttggtcaggctggtctggaactcctgacctcagtgatctgcccaccttggcctcccaaagtgctgggattacaggcgtgagccactacgcccagtatgtagtttttttgtgttttgtttttgtttttgtttagagacagggtctccctctgtaactcaggctgaagtgcagtggtgtgatcatagctctctgtaacctcgaactcctggcctcaagcaattttcctgtcttagcctcccaagtacctgggactacaggcatgcaccaccacgcccggataaattttttttttttttagagacgggggtcttgttatgttgctcagggtggtctcgaacttttggcctcaagtgatcttcccacattggcctcccgaagtgttgggatcacagatgtgagtcatcatgccaggcctcagattagtgttgaaactggaagtccagggaggccctgtatttgttcccgaggcaatcagggtggggagacgtgggtggatgagagaagtttgtgaggcaggatagacacagcattgtgactgattgtttgtgggaggtgagtgtgtagaagtccagagccatacctgggtgtctggcctggtgacaccgtgggcagtgaaaacatctctgagttggaaatcaggtaggatgaagaagacgtttggttagatttagggtggaaggggcatccagaggccgttggacacgtgggtttgggctcagttgaggtggctgcacagtaggcagggtgtgggatccattagtgatgtctgccttgagcacaggcatgggaagtggctgccaaggcttggctaaccctggaatgggtggtctgtcagcatcttcccctcaatcatttctttcttttttttttttttgagacagaatctcgctctgtcgccgaggctggagtgcagtggcgcaatcttggctcactacaacctccatctcccagattcaagcgactctcatgcctcagcctcccgagtagctgtgattacaggcatgcaccaccacacccggctaaattttgtatttttagtagagatgaggtttcaccatgttggccaggctggtcttgaacttctggtctcaagtgatccgccctcctcggcctcccaaagtgctgggattacaggcgtgagccactgcgcccggcctcccctcaatcatttcataacctacacagatggcagag

SEQ ID NO: 17 - DNA, 3775 bp, Homo sapiens
cattcataagactcagagctacggccacggcagggacacgcggaaccaagacttggaaacttgattgttgtggttcttcttgggggttatgaaatttcattaatcttttttttttccggggagaaagtttttggaaagattcttccagatatttcttcattttcttttggaggaccgacttactttttttggtcttctttattactcccctccccccgtgggacccgccggacgcgtggaggagaccgtagctgaagctgattctgtacagcgggacagcgctttctgcccctgggggagcaacccctccctcgcccctgggtcctacggagcctgcactttcaagaggtacagcggcatcctgtgggggcctgggcaccgcaggaagactgcacagaaactttgccattgttggaacgggacgttgctccttccccgagcttccccggacagcgtactttgaggactcgctcagctcaccggggactcccacggctcaccccggacttgcaccttacttccccaacccggccatagccttggcttcccggcgacctcagcgtggtcacaggggcccccctgtgcccagggaaatgtttcaggctttccccggagactacgactccggctcccggtgcagctcctcaccctctgccgagtctcaatatctgtcttcggtggactccttcggcagtccacccaccgccgcggcctcccaggagtgcgccggtctcggggaaatgcccggttccttcgtgcccacggtcaccgcgatcacaaccagccaggacctccagtggcttgtgcaacccaccctcatctcttccatggcccagtcccaggggcagccactggcctcccagcccccggtcgtcgacccctacgacatgccgggaaccagctactccacaccaggcatgagtggctacagcagtggcggagcgagtggcagtggtgggccttccaccagcggaactaccagtgggcctgggcctgcccgcccagcccgagcccggcctaggagaccccgagaggagacgctcaccccagaggaagaggagaagcgaagggtgcgccgggaacgaaataaactagcagcagctaaatgcaggaaccggcggagggagctgaccgaccgactccaggcggagacagatcagttggaggaagaaaaagcagagctggagtcggagatcgccgagctccaaaaggagaaggaacgtctggagtttgtgctggtggcccacaaaccgggctgcaagatcccctacgaagaggggcccgggccgggcccgctggcggaggtgagagatttgccgggctcagcaccggctaaggaagatggcttcagctggctgctgccgcccccgccaccaccgcccctgcccttccagaccagccaagacgcaccccccaacctgacggcttctctctttacacacagtgaagttcaagtcctcggcgaccccttccccgttgttaacccttcgtacacttcttcgtttgtcctcacctgcccggaggtctccgcgttcgccggcgcccaacgcaccagcggcagtgaccagccttccgatcccctgaactcgccctccctcctcgctcggtgaactctttagacacacaaaacaaacaaacacatgggggagagagacttggaagaggaggaggaggaggagaaggaggagagagaggggaagagacaaagtgggtgtgtggcctccctggctcctccgtctgaccctctgcggccactgcgccactgccatcggacaggaggattccttgtgttttgtcctgcctcttgtttctgtgccccggcgaggccggagagctggtgactttggggacagggggtgggaaggggatggacacccccagctgactgttggctctctgacgtcaacccaagctctggggatgggtggggaggggggcgggtgacgcccaccttcgggcagtcctgtgtgaggatgaagggacgggggtgggaggtaggctgtggggtgggctggagtcctctccagagaggctcaacaaggaaaaatgccactccctacccaatgtctcccacacccaccctttttttggggtgcccaggttggtttcccctgcactcccgaccttagcttattgatcccacatttccatggtgtgagatcctctttactctgggcagaagtgagcccccccttaaagggaattcgatgcccccctagaataatctcatccccccacccgacttcttttgaaatgtgaacgtccttccttgactgtctagccactccctcccagaaaaactggctctgattggaatttctggcctcctaaggctccccaccccgaaatcagcccccagccttgtttctgatgacagtgttatcccaagaccctgccccctgccagccgaccctcctggccttcctcgttgggccgctctgatttcaggcagcaggggctgctgtgatgccgtcctgctggagtgatttatactgtgaaatgagttggccagattgtggggtgcagctgggtggggcagcacacctctggggggataatgtccccactcccgaaagcctttcctcggtctcccttccgtccatcccccttcttcctcccctcaacagtgagttagactcaagggggtgacagaaccgagaagggggtgacagtcctccatccacgtggcctctctctctctcctcaggaccctcagccctggcctttttctttaaggtcccccgaccaatccccagcctaggacgccaacttctcccaccccttggcccctcacatcctctccaggaaggcagtgaggggctgtgacatttttccggagaagatttcagagctgaggctttggtacccccaaacccccaatatttttggactggcagactcaaggggctggaatctcatgattccatgcccgagtccgcccatccctgaccatggttttggctctcccaccccgccgttccctgcgcttcatctcatgaggatttctttatgaggcaaatttatattttttaatatcggggggtggaccacgccgccctccatccgtgctgcatgaaaaacattccacgtgccccttgtcgcgcgtctcccatcctgatcccagacccattccttagctatttatccctttcctggtttccgaaaggcaattatatctattatgtataagtaaatatattatatatggatgtgtgtgtgtgcgtgcgcgtgagtgtgtgagcgcttctgcagcctcggcctaggtcacgttggccctcaaagcgagccgttgaattggaaactgcttctagaaactctggctcagcctgtctcgggctgacccttttctgatcgtctcggcccctctgattgttcccgatggtctctctccctctgtcttttctcctccgcctgtgtccatctgaccgttttcacttgtctcctttctgactgtccctgccaatgctccagctgtcgtctgactctgggttcgttggggacatgagattttattttttgtgagtgagactgagggatcgtagatttttacaatctgtatctttgacaattctgggtgcgagtgtgagagtgtgagcagggcttgctcctgccaaccacaattcaatgaatccccgacccccctaccccatgctgtacttgtggttctctttttgtattttgcatctgaccccggggggctgggacagattggcaatgggccgtcccctctccccttggttctgcactgttgccaataaaaagctcttaaaaacgc

SEQ ID NO: 18 - DNA, 1017 bp, Homo sapiens
atgtttcaggctttccccggagactacgactccggctcccggtgcagctcctcaccctctgccgagtctcaatatctgtcttcggtggactccttcggcagtccacccaccgccgcggcctcccaggagtgcgccggtctcggggaaatgcccggttccttcgtgcccacggtcaccgcgatcacaaccagccaggacctccagtggcttgtgcaacccaccctcatctcttccatggcccagtcccaggggcagccactggcctcccagcccccggtcgtcgacccctacgacatgccgggaaccagctactccacaccaggcatgagtggctacagcagtggcggagcgagtggcagtggtgggccttccaccagcggaactaccagtgggcctgggcctgcccgcccagcccgagcccggcctaggagaccccgagaggagacgctcaccccagaggaagaggagaagcgaagggtgcgccgggaacgaaataaactagcagcagctaaatgcaggaaccggcggagggagctgaccgaccgactccaggcggagacagatcagttggaggaagaaaaagcagagctggagtcggagatcgccgagctccaaaaggagaaggaacgtctggagtttgtgctggtggcccacaaaccgggctgcaagatcccctacgaagaggggcccgggccgggcccgctggcggaggtgagagatttgccgggctcagcaccggctaaggaagatggcttcagctggctgctgccgcccccgccaccaccgcccctgcccttccagaccagccaagacgcaccccccaacctgacggcttctctctttacacacagtgaagttcaagtcctcggcgaccccttccccgttgttaacccttcgtacacttcttcgtttgtcctcacctgcccggaggtctccgcgttcgccggcgcccaacgcaccagcggcagtgaccagccttccgatcccctgaactcgccctccctcctcgctcggtga

SEQ ID NO: 19 - DNA, 30828 bp, Mus musculus
  misc_feature (1)..(42): "n" at positions 1 through 42 can be any base.
  misc_feature (15334)..(15753): "n" at positions 15334 through 15753 can be any base.
  misc_feature (22853)..(22872): "n" at positions 22853 through 22872 can be any base.
  misc_feature (30603)..(30828): "n" at positons 30603 through 30828 can be any base.
nnnnnnnnnnnnnnnnnnnnnnnnnnnnnnnnnnnnnnnnnngggagttccattctcagcccgctgctactgcctgtgagcctcctttgggaaagtccttaatttctctagttctgttatttcctcatctctagaatgggcatcacgacactgatttcacagagttgttccgagatgaaatgatgtgatggagtaagtactagttcccagcctctcagatcctggaaatgggtgtcctgcctctccctctggaagctccctgaaggccaggctttgggtccttcatccaagcttggatgagtattttaaaagagtctccgtgagttttgctcattagccaaaacggatgctggcctttggaagcggggcggatgactctgcgtggaaatattcttctctgagtttccctcctctgcctacttcctcgtgagttctatgtggcatctatttgaggtcaaatctattgaaatatacttcagcttaactctaggtgccttttagttgagcaccaagaatatactaagtgctatgtaagaaatagataaaggacccagtatggaggaggagaaataccaagccaagcctagtactcaaaccgcagacagtgatagggacagccggatcgctttctgtaggcttgagggtttctgaaattcttcagggaattgggagctctttgagctggacttttttaagcgtatgagtgtttggtctctctctatgcatctgtgtcatgagcatacctggtacctatggagaacaggagagggtatcagacaccctggaactacagatagttgtcagttgccatgtgggtgctgggaaacccaccctaggtcctctgcaggaacagcaagtgctgaagggactactgagctgtctctccagccccttacgttaaatcttgaagaacgggttaaaagatgacagagcgggggagaggtaccggagagaaaaatgtgtgaaagtagtcagggccttgacctggaagagttagagaacaaggcagatgcagttggcaggtccggagcaacagctcctgagtgttcaatgggccaagttgagaggggctttggatgccatgaaaggttgccgaggagaaggaagtagagagtgagtccttcagctaccacaggggaagggtgggaagggggtgaggagatttcctaaatgtgcatcattggccttctgaggtcttcagaagacgaccagtggggtccccaaagggtgagaccagacagaacagacagccactattccctactctgaccccctacctcaagaggaaaggacgaagagagagctgagaagagaccctgagcctcttcaccacagcagacaggaccaagtttcagcaggcaccaggacactcaggtgtctacgtcagtcgctagctatgcacatgggtaccctgggcatggaaagtacagactggctttctaacacatcattttgccgtgagaccaatcccagcattccctctattgtcctcaacagaatcaaacgtccaagctaaggggcttgccacctctccaaaataaaggtcaccttagaggtcaagaaagcattgacacaaaccttgggtaagccctaagactgtaacttgggagttgtcatgacaacagggcagtagagccatctctactctctcctaaatggcacgaggtttagatgagtaactctgaaagaacagaccccacccctgttttcctatttaccatcttcagacccctcctcacctgtgccccagccctctcctctaggaccttagcaacttgaacaacatagacacacacgcctcctctcagtgtccaacaatgagccctcccagcaaaacaggaagcctcttgctgccaaggcattgtgcttgccctgtcacgtgtcaggaaaccactaccgtgccatggcaacaggtgttgctgagaccttagccttcccgccaacctgtgccctgcccttctctctcctccttactcctagagagtgtcctcgttgtgcagtgtccttgactcacctggacactgctgtgagtgagcgtcctaattaccttaacttggatgagaagactaattcaccctataagtcagtggcccagggccagggcttgggccttagactgcataaaaaggagaaagcttgccgactgcaggtgttcatctccccttgtttcctgcctatcagtgcaatgtcaccagccactccaagccaatgtcaccaccagccaccccaagctcctgctgccatgattccccaaccaggatggactctacgctggaactgtgagctgtattaacgcttctcccctaaatttttcttgtcaaggtgttttcatcacaacagcagaaaaaccaaaaccaactgacacttcctccttgcaactggcagctcacatcgcttgctcctttcccatttggacaccaaagatctcactgatcatcatccaaacacagttcttcatgctagccaggcaacataagaatgtacctgtgtggaaatttagcaagcttcttagctcttttggatcgcaaaagtctaggtaaggtctgagatgactctctctcaaattccaatatccctaaatgtatgccagaccttcctgtaaggttgctgagtcctgaagctaaactgactgtcttagttaaggttagtagtgctaccacaccaaaaacaaaacaaacaaacaaaaaaaaaatgaacaagccaggcgtggtggtgcatgcctttaattccagcactcgggaggcagaggcaagcagatttctgagttcaagaccagcctggtctacaaagtgagttccaggacagccagggctacacagagaaaccctgtctcaaaaaaacaaacaaacaaacaaataacagcaacaacaacaaaaacatgaacaaaagctatttggttggggaaggttttattggctcacacttccatatcatggtccattatcaaaggaagtcagggcaggcactcaaggcaaggcaggaacctagaggcaggagctgatgctgaggccatggaagagtgttgcttactggcttgctgagtctgctttcttttatcatccattgttacatggagattaatcaaagttgcatgaaaagaagagagaaggacctcctcagacgcagatggaagcatgtggtcctttgttaggactctgaagggcagtggtctctcagaaaaaggctgtcagccaaggcacagggggtttgagggttttataggacagaaaaggaagcgtttgtggttggaaaattccatctgcagatctgtttcctcaagtctcagcactgtaaataccaacggaggttcttatccattagtgaatttcttgtcaggagaatcccggctcctaactgcctgcagatgttagcagtgtatccctggtgccatccggagtttctcagctctcctggggcttttaggtcattaacccttcacccaagaccagcagcagcagcaccgcccagtgaactagcctcagagactcaccctacaggccaatctgatggacgcatttttctcaactgtggttccctcttctcaaatgactctagagtgtgttaaattgacataaaactagccagcacactgatgattctggagtgaaatcaaaaggagcttgaagatgagggtggggacagaggcaagggtatgtcttagactttactcattgaattgcaagccgagaaggattagaagacatcagcagtatcagtggacaagtggcatttgaatgccatatggaagaaggacaataagaagttcctgcagacctggttccatccagaagcctctgctctgactcctctcccgggactctttaggtcaaggactttctccaggggtctcaagactttctgtgttcctttatactaagttttctttcatcctgtgaacaatcaagtcatcagtgaggtggttgggtgacatggcccataaagatgacttccagggacctggttcctgctcacactctgaaacctttgctcctgggcaaaacttcccctaaagaacaatgacacacattctcagagaacagagaacaataagccgtgtgtaacaacatcttccagagagagagaagcgtggatttagtccttttgggccacgctcagcatcagcaggagctagcttgacataaggagaaaagccccttagcttggagctaaaggtcacatcacttttaagtctcagtttctacagccacagaacagaaagttaccaaacacagcagcctgagggtttcatgtgagaaggtcatggagtcccaatcactcactccttaaacttgactctgtctgcagcccccagctggccttgaacttgtggcagtggagaatgtgcttgaaatacagaagccaaatagaaacctggaaatgttacttgtcactggttggaagccctggaccatggtggatggacactcgattctgagtacctacccccaggactccccagagtagatgtttatagttgctggatgatggtggatggacagacagacacggactggcgcctaagaaaagtctagcatgtcatcacgtactccagcagcccgagagcttcatgtcaaagacacaaagcaaagccatctcatgtgccaaccacaacctagccaatgggcagttatcaaagccagaaatctggcctagaggccatagcactctaaaatgaggccaagttaaactatgtggcgctctctgccctccaaactgccaacttcagcagcccttttgaagctgagtcaaactcctgaccatagcgtttcttttcaccactgccttcctccctcacctggcccactccctcagctctctaggtgccactcttcccataggagtcttggttggactcctactgtgcctaagctatgccaggctgttccctagctaagtcctgcagtgttgtgatgcaatattgtcctccattatttcctaaataccatgaaatatttaatatataaagccataaaaagccgggcatggtggctcacacctttaatcccagcacttgggaggcagaggcaggcaaatttctgagttcaaggccagcctggtctacagagtgagttccaggacagccagggctacacagagaaaccctgtctcgaaaaaacaacaacaacaataacaacaacaaaaagccgtaaaaaataatgcaatgaagactttagttcatcataaataaaacatcaccttccgagcccttcccaaaattaaggtgagcctgtttgtgggtgccatttctcttcatattgtttgagagtgattgtgtcttgtcatttgtctcactttgtgttccttggttttttggccacagagtctcactctgtaaaggtggcagatccaagtgtggcaatcttcctacctcagctgctgctgctgctgctgctgctgctgctgctgctgcttcttcttcttcttcttcttcttcttcttcttcttcttcttcttcttcttcttcttcttcttcttcttcttcttcttctttttcttcttcttcttcttcatacggtattctgcctccatgtatacctgcaggccagaaaaggacaccagatctcattagagatggttatgagccaccatgtggttgctgggaattgaactcaggacctcttcaagagcagccagtgctttgaatgtctgtgctgtctcttcagccttcctcctcctcctcctcttcctcctcttaataatttacttttattttatgtacattggtgttctgactgtatatatgagggtgccagctcccttggatcaggagtcatagacagttgtgagctgccatgtgggtgctgggaactgaacccaggtcctttggaaaaacagccagtgcgcttaactgcagagccatctgtccagcccctgcctcagcttcttagtgctaagattacaggacttcatcagaaccctctgttgataagacaagatccatctttgtctatcttcttcactgtggtggactggatactccctaccaccatcacccacaaagatcatatgctaaagttatgaccctacgatggctggatttgagaataaagctgttgggggttggttttaatgctttgaattaatccagcccccaaaatcgggaaactgcatgtccaaacactaaagatccttgtccccaattggtttttgatcaatcaaaaaagagccaatggccaatggttgggcaggtagactgaaacaagacctttagatttgctcaggctgggaactgggagagaggaaggagagagcattgtcgtggtttggagggaaacagatcagaattagagacgcaaaaggaaaagcatccgaaatgtaggagagaaagaattcgggccctggaggaacagctcagaagtgtcttgggcagcaaagactggggtaggggcacccagaaggagccagggcaacaaagataaaatatagaattagagggcattaagccaggagtaccaaagggaaatgtgttctagccacagggaagattagaactgcccagcctttgagctagtcaaagcatatttaaaattaactggtgtgtgtgtgtgtgtgtgtgtgtgtgtgtgtgtgtgtgtgcttcattcttgaatccagatagctcttgggcaggtgcatgggtgtgacgaatcgggagcacaaaatgatttagctaactactgctacgtagagaatctaaggaagttatttaaattaaatagcactatagagtagggtcctggttccatggaattggtatgtgagtgacattaccagaaattgaccctactggcctttgccttgggacttccagcctctagaaccatgaggaaacatatttctgttgtgtaagacatccagtccatggtattttaagagtccaaacagactactcactccatgtaagttaagcaaggccaaggatcatgtgtgcttgtctttggatcaatactgtccatcactatacctaacacataagtgcatgccaaatatctgtttgttgaatgaatgaatgaatgaatgaatgaatgaatgaatgaattagataattactaaaacaaaacatatagggttctggggtatgcaagatggtttaatgggtaaaggtgcttgctgacaagcctgacaacctgagtttgatcccaggagtagacctggtgggaagaggagacttactcctgcaagatgtcctctgacctcaacaagcatgctgtgccacatgcctgcacacagctctttctccctctcccttcccccacccccattctctccttccttccctcatgcctcaacatgaaagctctcggctactgctcccataccttgtttgcctgcctgcctcctgccatgccatcatccaccatgatggatgtgaactcatcctctgaaactgtaagcaagcctacaattaaatgctttcttatataagttaccttggtcttgccatctgttcacaggaataaaaaactaaatacaacaaattatacatgccccccccaaaaacccttgtaaatgaatatttatagcaacaatactcatgataactaaatagtagaaacaatccaaatagccaactaatagtagataaaacaaatgtggtatatccacacaatggaatattattcagccacagaaaggagtggagagttgaaacatactccatatagatgaacctaattaaaagaagatagatatgaaggtaacattgtgtctatttatgtgcattaatcaacagaagcaaatctacagaaagaaagtaggtctgcggctcagagcagttatgtgcacaggtggaaaggacatgggaatcatcggaaataatggctgaggagatctgactaaaaatgattcaaagtttaccgtggcgaataaacgccgtgactatataaacaccacagaaatgtctactttaaaagaggaaatgtggggacgggagagatggcgcaacagttaaggacacttgatgctcttgctgaggatccaggctcagttcccagcacccacacatcagctcacaaggcctgtaactccagttccagaggatctgacgccgtcttctgacctccacgggctgtaggcacacaggtggtacacagaaaggcactcaggcaaatgctcatacacataaaataaaaatcaatgaatcgttttcaaaggtgaatttagatatgaactatagctaactagagctgttgtcttttaaaagaaaggaaggaaacacagatgaattcctttctttcaaccttccattacctgtcagtataacctcatggccaattctctccagaagctagagggaaagtcgtccgggaaatgtagtccctgtatgcagagcagagcaagggtatcaagtgagtgcctaaagggttatgttgtcatggcaactgttttaactatttatttatcttatgtatatgagtacactgtcactctcttcagacacaccagaagagggcatcgggtcccattacagatggttgtgagccaacgcgtggttgctggggattgaactcaggacctctggaggagcagtcagtgctcttacccactgagccatctctccagccccctgtttttaactagttaatacagaagaagggctaagtcattctgagctctgtgtcgggtcctgtcgctcactgaattgtctacaatcagtggctagagataaaaaaatttacaggtgtctctcctggaaatggaacatttagatatttgctctagaactcaatggccacccacagtccccacatgatctctatgcttgttttaaacccactccttggactggggaggtggcttagtagctaacagagaattgccccacaaacacgaggaactgagtccaaatcccagaaccctcataagcagcttggcagtagcatgagcattcgtcatcctagcagtcccccaaggagatgggaagcagagacaagagaccacgcacccagaaggccagctcaccttagtatagaatggggcactcaataaagacgtgatacctgcaacagaatggaagtaggctgacacctgacattgtctctgatcttcacacgtgcaatggcataaaatccccacattcacgcatacgatcgcacacatacacgtgtgtacacacaccatacacaccacacaggcacaacaattaaaaatgccaataaatatatcaatcagtttccctgtgggggaaaatgggtgtggtcacaaagaataaaaaaagtaaaataaaaataggccaggcatggtggcatatgtctttaataccagcactcgggaggcagatgcaggtagatctccatgggttcgaggctagctaggtccacagaacaagttctaggacaatcatggcactgacaaaaataaaataaaataaaataaaataaaataaaataaataaataaataaataaataaataaataaaatctcttcttggggaaccagtttggataatgacttagacttgatgtcctcctcggttagtagagaaagccgaggggctccaggcaccctcatatctagcatctaggtcctgtgatgtttagcttaagtactaaaaataaacactcaaactttcacttcgtggttgtgtcactgaagccttgctggccggaccgttcaacagacctcaccctggctgcgcaggtgtatgtcggggctgcctggcggctgctgggacaatagccactgatcaagttcatactgaaagggagacttttattcaaaaccaagagaaggatgcaagtacacctctgactcccgagcctcagcctatctcaccccacagcagccacccaggcgtgcttggcactcacagatgtaagcagctcctccctgagtctctacaaggcactactaccaggggctttctgaaggcaaacgactcagtgattcaggatcctatgacagccgaatgtggttatcacataccttgtggcccaggaagactctgaggggtgggacaggagtgggaggggctctggaacaacttaaaaggggctcttaccacttcctccctgccagagagggctagctggagagagacaagaaccaaaagcacagccttcctgtgtgatttctacagcccccagagcaccatggacccaggtaagtaagctttctcttaagagaagtcaaaacttctgacacaaagccagactctagggcaatgaacatgcatgggggataggggtcatgggggggggggggagtttcccagagcaatcagggcagttggtgtgaactggtggctgctttcagagaatgccatcccgttggatgaggcattggagagaggatgtacctgctctttcagacccaggggaaggaacagctgtggatgccaagacagacacaggcataaagttgggtcctctcaagcagcaggcaatgaacagcctggtagactgaccttgatgcctggatagaacacgttctcagctggtagggatgggtgatgttctctggcacctctggggactaagaaaattctctttagagagttcaggacaccctgctcccactctgggtccctcctttctgtcctgttaaaccaggatttgaatctccttgctcacgagaagagtgaaactgatggaaactgtgctgtgcatagtgcaatacaaatactagctgccacctctgcctcttgttgtctctgcctgtcatctgtctgtctgtctctgtctgtcttcctccctcccttcctccctcctacacatcccaggttttgtgcctcttgcaggttaaagggtgaatgactaacataaaattgagtggcccagggggcactccacgtagagaaactgtagccagcacagcacagcccctaaaacaaagcccacacaccacagccctctctataacaagctattctaccaggcaagcctcagtgtctactatagcaaagtgccaaggggagtccagctccagacaccccagttacacatcttaaatctcggctgcagagtcagactcggctggggctggaggggccaagttcctagagttccgctcaccagcctcaaagccacaaggggttgactttaaaaagtgaaggttccctggtgctgtcctcacaccccctccaagccacaccacagccagcagcatctttatctgtctctcctgcccagcgtgcattgcaccctagatctagatccagctgtggaaggtatatagtggggtccacctctgctggctatgaactcatgggaagcaggattttgttcttacacctctgcctctcagatgttttgggtgtaagtaaaaagtgttgatgggagggagggagagagggatggaggaatggatggatggatggatggatggatggatggatggatggatggatgtgtggatggatggatggatagaatcagcctctctaagtatattttagaaagcaaatatctattccagcttctcctcccacctgcctgctttctaagcctacacctcaggtatctacctccaccagccatagtctcagagaacccacaccatccaccaaagatcttctccaccttcctaaaatgtggctcccagaatagggaaaggttctaaatttacagcatttgccaatttccatggtgtaaattttaccatcccaattgaccttagtcggtcccattaaaggtctaaatgttttgacacaaaaaggagacagacacctgccttccttggcacttgggacactatagagtctctcctgaactaggtttggggatgctaaatgcatggctttgatacagggggtggggcaaactctggtcctggaagaagagatagtcttgcttttttactcaacttaagaagcaccctaatagctaactctgaaatgctggtgtgaggggaaactgcttaagaagttttgctcaaaacaggctccggcgccgttggaagggcgggtgggccacaaactatctgtttttcactctttgtctacctagtagggacaggaggtgggtgagaaggcctaggtttctgttatacaaaatgagaaactacaaaccagggctgagctggcctctttcatgatttgaatgagcagccctgatatacccttcctaacttcaagacatgggaccacagatctcagcacaacatctcaaaatcagagaaggggagggggtgacaaatgaacccataagagacttgtgtctcacagctcagctgtagatggcagtagaagagaattcagggtcattctcttgtggccctccagaaacctggctgtggagaacactggagcccagagtagctaggaaaaaacgctcctctgtgtggtattgtcttccagtcatgtgtcactcattgagaacttcttgaatacagagtctggtggggaacgtaacatgtatgtcaacacgcaacaccaacagtgagagacacagcactcctgagggggcataaggacaagattcaaaagcaaaaagcaaggctgtgaacacgtgtccagaaagcatggcaattgtattttgaagggtgtgtagaagttgtcaaacctaataaagaagggccaggttgtagccagatcttcagactctacagccttaagccaacaaagtaaatgaggcatccgagtgtcaggaacgtgactggcacacaagcctgaggaacctgagcttgtagcctcagagtttaaaagctggctgtagcaaggtacacacgtaatacctaagcctgcttagggaggcaggaataataagacttgctggccaaccagtcttcagaattggcaaactccaggttccatgagagacactgatgtcagcctctgacctctgtatgtgtgcacacccatacatatatgagcacacaccttgagctcatagtcagtcagctctggtgaaggcaatagagcaacaaggaagggggaatggtgtcagctgatgggagtcagggaaatagatgtgccaagaaacaagctagactggggtggcccttacagcgctgtgtgacagcaccagggaatccatacaccaccctaaaaagaatgggggccagcaaaggtcccccacccttttccaaatagatgggcagatagatgaaatgtgtgttttggaaggagtaggggacaacagatccttgtatcaggacaggggagggaccaacatcaaaagatgtggaagatcgagatgtggaagcaacagacacgagtggccagaagcagtagagagagcaagagtggccttgatctgtggaggaccctccacacccaaggctcatcagtaatgtcacatgactcagccattagaacccaggctagatgttcccctttcccatctctgatctattgtttaatagctatgtgaatccagaggaacgacataacatctctgggcctgtttcctagaatacaaaaggaacttacaagatgttatgaggggggagagatgtagggagaggagctaggagtgaggtggccatggccaggggctgggtgtccttagggaagccttgtgctgacagttcttccgttggggctgattgtcacgtggggtctcacagggtatccattgaggacggggatggcagcgcctgtctcacgtggacagcgcacttcactgaaagctcagtgggtgccaattgcatcactgagtgacagcgttggtgccctaataacaagatcccaccagctctcacatccctgcctcccatctgcgggctgggtccctgcttcagcctctgccctttctcatgtcccctacaagcggctgagaaggtccagagagaaaatcatcacctgaggtgtctctcgggccagatgataagcagccatggtttcctgggcagcctggagggactgggggaatgtacagatgggagctttaggacctgagcaggaggcgactggcttcccaggctgggagctgggggcgggggagggaattgagtgtcaggctgaggcagggcagggcaggggagttgggatggtgtcgggctagagtgctagggagttttcctttcaccttaatcattctgcaaacccaagaactcaggaaacaccgaacacctcaatcaacagctcccccacactggcattcccaactgcccgtagctcaagagcagttgctttctgactattgagtcatctgactcaccaacactgaccaggtccctctgtcaccacacgttcaaattcccccaaattctcctgttaactgccttgaacatggcctgtcctggatctacaggaccccgactcacccacccaacccccacccccaacctcatatccagtatccctggaatgagacatcaattttgttcacacaccccagagcccctccgggtttgtggctacaaaagaaccgggacagaacccagagtaaaacagaaacagttcttgttccttaggggtttctccacgtccctgacagtcagattgggctttctctacagtaaccgaaagccgttgatgggttgaaagaaacctcgaacgctgaaccccgaaatgagtcagggaagggcgggctgtgcatcagaccctgaaaatcctatagttgagaatgggcatgtgacctcaagctcgtggggtgggggtggggtgccaggggtaattcagttgggggggggaatgtgtgagagagatgagctgtgaagccacgtggtgatgttccccttcctgtctccaaacgttctagtacaagctgatgataaggggacagtggctgtctgtccccagaaaaagatggagctggtgaggcatgggccccacgctaagcctaagcgtctctctatctctacagctaggatttcgacttatggttagggatttaggagggaggcaagataggaatagagggcagagttagcttcagtaagacgtgcttacatagcatggaggagaatgtagaggggaaaaacgtttgtccgggtcaccctgatgcccttcctgcctgtactgagtgaccaagcgtagcctcctcagcctggagtacatgtcaggtaccctgggtgtcatgtagcctagtctccagcaggtggtgctatggccaaggacaaacaacatctgcgtttgaactgtttccctggcctcaagaggtcccccagactcagattggggagcaaagtcctactctggactgcaagacccatagggtctgactcttcctgtagatctgaagaactgggattcaagggctggagaggggtgccaatagcaaagaaggcggatcaagggtccccaggggtgagacgggagtatgtggggtagaggtctggggtggggggcataagatgtctgcaaaaattacttttccagttgtcctcttgcttagctgtcaggagaaaatacagcccaggctggctcaaggctcagctctgagcagaatgaggagtggtcgctgtcatatnnnnnnnnnnnnnnnnnnnnnnnnnnnnnnnnnnnnnnnnnnnnnnnnnnnnnnnnnnnnnnnnnnnnnnnnnnnnnnnnnnnnnnnnnnnnnnnnnnnnnnnnnnnnnnnnnnnnnnnnnnnnnnnnnnnnnnnnnnnnnnnnnnnnnnnnnnnnnnnnnnnnnnnnnnnnnnnnnnnnnnnnnnnnnnnnnnnnnnnnnnnnnnnnnnnnnnnnnnnnnnnnnnnnnnnnnnnnnnnnnnnnnnnnnnnnnnnnnnnnnnnnnnnnnnnnnnnnnnnnnnnnnnnnnnnnnnnnnnnnnnnnnnnnnnnnnnnnnnnnnnnnnnnnnnnnnnnnnnnnnnnnnnnnnnnnnnnnnnnnnnnnnnnnnnnnnnnnnnnnnnnnnnnnnnnnnnnnnnnnnnnnnnnnnnnnnnnnnnnnctgggcagcaggccaggtgttcaaacacacaatctggttctgatgttctctttcagcaagcccgaggtgcctggagcctgggataaaagttcccaatggtgcccctgccccacccccgaatgtctccttaatcaccgagcaatttttaccggggcggtaacatcatctcctttgtctcctctagggaaacccaggaaaaacgtgctggtggtggctctccttgtcattttccaggtgaggcttcctgccagggcaagagctctcttccctcctccacaccccctccccagccaggagtgctggaacacaaacagaccgctgcaaggaacgaaaggtctagacacaaacccacctgccgttcacggccccttgccccccccccgcctcccccccacgaagggggcaggcattctctggacttccattgtccccctttaaaataaagcccagggagacgtaacctacccccaccctcgttcttcccagctcccacctcctcactcaggagacagaaacagtgtctgagatctcttagacttgtgcaacacagggcttagagtgggcctggttttgcacataggtgcacacatcatctgtgaactgagaaaaggaccctcggtcgggcgctctggttactccccagtcacccagagttgcttcctcttgcctttcagtccaagggtctccttgtaatctcattctgttttccttcataaaatagaaagaccttggcttggcttgcctgtggggagcaggagggagaatgagtggagcccgggacccgggtggagaggacggtgaagggaacacatagtgggtctgaattctgcagagccaagagcccactccgttctctatcccagcaatggaggcagaacgtgtgtctccccaaccaccagagtcaggagaaactctgagagtcaagtttcctcaattggggtaggactctctcaaggtggggaatggccacggccagcctggagaagcaatgcttcaggatttgactttctcccaggtccggaggccagagggggagctttccaggagctcaggccaggcacaggccccaggctgggcactgttccccaaacccctctcagaggccccctggagcttgggttgcagccccttagcctggccctttccccatcaccactcccgcccctcctgtactgctggctggaaggccagagaagggtaaagacatctgtggctggtttttgtctttcacttgggaggaagggggggggggggttcagacaaggccggatgtggtggggctgtgggctgcagaggcggcaagcttgggggaaggggtgttgaacaggagggagaagagaagactgggagggaggtggtgtgggagcacacttcatagaagctgggagttctgacctccaaagggtctagaagccctttaagcctctggggccgcagacctaaggccacagacccattcgtgaagagccaagcgcagctaacctctcccagggcccccaggctgcagtcaaacctggaccagggaaacaaggttgctatggactcttcttctcaagttagccatgccccaagaaagggctcctgaacaccactttgtccttatcctgtcggtaggctcacaatggtggtgcgatctgtggatcaccactgaatgactgaaaatctcctacccagaggaggaaccctaaactttccaaagtgggccttcaaaccaccccacccccctcccatctgtggtggtccatccatcacacacaggcagacggcaggcaccccctccattgataaaaatcacagcagctgctgaaccgtcccccacacgcaccctgcagccctgctaaagggctaaaaaaagcccagaacagctgagccctgctgattgggatctgccggaagagaggcaaagaggtgtgggaagagggtgggaacacagagggagagtgggggaagagagccgcttccttccaggggcacaagccgccataggaaggcagtcacatttacccaagcactaccccacaggccctacggtacatttgtctacgcgctgagtgtagtgggtaccagggagctgtgaaaatccccatgtctcttatcagcagtccctcgactgaagtttattcctacaaaggagctttgatcttctcttcctgcttcggaccttcctcaaccttgaacctaacatagggggttgtttttttgttttttccctcgaaagctgaggcattttgtagcccccaccccaaaaagaaaactctcctgggacccaaaagaggctccagaagaaagacacactttccccccacatcacagggtcccaaaccccacaacggtccagcacaggagttgcgatttgcctctatctcccagacacagagaagatgtgcgatttccagctcagggctcagcagaccccaaagccctagactatccccaatctcagccagtgaggatgagactggatgtcccaggagttgacaaaacatcaggcctttgctactgatgagtagaaatgtaaactttctggtcctgcctgagtctgcagggccagacgtttacatcttaactagatcctccctgagtaattcatacatgtgctaacatcgttacttagatttattttttgttttggtttggttttttggctttttaagatttttttattcattgaacgtaaatgcatacactgtagctatctttagacacatgagaagaaggtatcagatcccattacagatggttgtgagccaccgtggtggttgctgggaattgaacccaggacttttggaagagcagtccgtattcttaaccctatttaggattattttattttatgggtataaacattttgcctgcgtgcatagaagtacaccacatgcacagaggaggtcagagttgggcatcagagcccatggaactagagttacagagagccacgacgcaccgtgtgggtgctgggaaccgaaccggccttctctaccagagctacacgcactctgctcttaacccctgagccagttcttcagccccacatgctgaggcttaagaggtgtggatttctagtcaaagactcacttggggtttgagggggaaactatagtttcctgggctcctccgtctaagatgctgacccaaagggtctaaggtctgagagtctgcaagagaacagaagccccgggcaatgtcctgactgtgagatccggactgtgagctcatcaggtgcttccttcccccttaggtgtgcttctgccaagatgaggtcaccgatgactacatcggcgagaataccacggtggactacaccctgtacgagtcggtgtgcttcaagaaggatgtgcggaactttaaggcctggttcctgcctctcatgtattctgtcatctgcttcgtgggcctgctcggcaacgggctggtgatactgacgtacatctatttcaagaggctcaagaccatgacggatacctacctgctcaacctggccgtggcagacatccttttcctcctgattcttcccttctgggcctacagcgaagccaagtcctggatctttggcgtctacctgtgtaagggcatctttggcatctataagttaagcttcttcagcgggatgctgctgctcctatgcatcagcattgaccgctacgtagccatcgtccaggccgtgtcggctcatcgccaccgcgcccgcgtgcttctcatcagcaagctgtcctgtgtgggcatctggatgctggccctcttcctctccatcccggagctgctctacagcggcctccagaagaacagcggcgaggacacgctgagatgctcactggtcagtgcccaagtggaggccttgatcaccatccaagtggcccagatggtttttgggttcctagtgcctatgctggctatgagtttctgctacctcattatcatccgtaccttgctccaggcacgcaactttgagcggaacaaggccatcaaggtgatcattgccgtggtggtagtcttcatagtcttccagctgccctacaatgggggtggtcctggctcagacggtggccaacttcaacatcaccaatagcagctgcgaaaccagcaagcagctcaacattgcctatgacgtcacctacagcctggcctccgtccgctgctgcgtcaaccctttcttgtatgccttcatcggcgtcaagttccgcagcgacctcttcaagctcttcaaggacttggggctgtctcagccaggaacggctccggcactggtcttcctgccggcatgtacggaacgcgtcggtgagcatggaggcggagaccaccacaaccttctccccgtagggggctcccctgcccggactacaaggacctctcccaggagccttaatgtggtgcacacatgcacagactctccatccaccgaattgctgctgagggaagagcaattctggccagtcaggttgacatgaggacctaagaaactgcttaaccccatcccacttataactacctcaaccaaagctgtaaaagatatggctgagaagttaacactcaagccaagacagctatccccaaaacgacagccaaaagtgaaagtgagaggctgccacactttccggagtgagggatgtggggccagtgaacaccctggttgagtagtcttcggaggcctctgaatgaacctgcttctagcttagagagatgtcccggagattcaaggacagagcttatctccacacttagcaagcaagcaagagatgacagtctctctaaatgctcccacagagcacccctgcccctcccttctgcctctccaccgcctttcctgaggtccaggccacaccatcagcctgaaggcagtcccagctggggctctggatggcaatgacaagtagttgggtctctatgatgggaataaaaaggtaggggaaaggtgacagaaaggagagaaggtgaccctgctggctgacagaggccagcaagctacttctttgttctctgtcagccactgatacctttcctcatgttctgcttttgattcatatatcttttatgaagaaacaaataaaaaaaaattttccctcgaggaaacaacttggaaagaagggaggaaattccttggttaaatggcgagtgagtgagttgtccccccattccacctgagagtcctgcgccccacacccctccgccccagccttcctttctcagcactcagaaccatgaggtcacagagcctctccggagatgcaaacccaggaggctgcaagaggtggaaaaagagcgaagacaggatgtctgtcttgcacatacacctgcagagcccgtgggatgggacctaggcccttacaggcagcagtatacataggagagcactctgagtatggaaagacgaggttgtcccaggaactcctgtgtctgggaactcagaggaaccccgggttggggggaaatggacacctgcatcctgttgtgtttgctgtaacaggatagcccggaaacagccctaactcttgtcaggccccttcagacttgcgtacattcctctaagaactccagtttggtgggaagctcagacagaggtcatgacattctagagtaagggaactagggactagtcagatgccacaggctggatgggactctgcagggtgtttgagagctaggaccactcggtcccctcctttctacccactagtaacagaagttactgttaccagcctgacccctaagtgcctctgtagtgcgagtctcagtccatccccgtttcctgtaacaaaacactgcggtctgcggaacttatacacaacaggaatctatctctcaccattctagaagtgagacaacttccactctagtatctcccaagtccatttataaggccttaaatccattcatcagggtggagccttcacggccagccagttatctctcaaccaccccaccctccaataccatcatcccctagggttcaaattcaaacacaggcctattggagggacacacacattcaaaagacagcggtgtggaaagcagagggagagggccagactctgtcgcccctcactccatccccacaggccaagtgtccttgtcattgtgtcccagtgtctaaccaaagccctaatttccccaagcccgagagcttggtccaaactatgatacctgggcaaatgtccaatggcttagcacccgaatagctctgagcctggcggtaggatgagggtggggggtgggagaaaaaaggtgagacattcacacaaaaacatagttccaatccccccccccccaagaaaaaagaaaaatggagcctgttccataacagtgctcattctctaagcttgtaaccacaaaacacccattaccctcctccacaggatgcatggggctagaaagactttaacacaatttgtcaggcggcctcccggtctggaatcagcatcgtgggaggaacgaggctggctcaagtgcaggcagtggctggtggcgggtggcgggtggcgggcagctttcgggatgctggtactgaatattaaaaaggttcagttgcgactgtgtgaccacaagcacgctgcaagaaggcgatgccactggccacggtcatccccaaggggaacctgccagagtgcacgtggctttgtagatcctaatgaagttacagatgggaaaacagccctcgattcctaccagggaggaaataatggagggatcacggaaggggaagctgggccaaccacacaagcatgccaccctggcctcaaatacattgcgctagtataactggacatctccaaatatttacagaaacaacagaacccccagcaatgctaattccccaaactgctgtgtctcagaagttctatcctcagcttcacgctggcctgctgcctaagacctggcctgatgcactcttgtgcctaccaagggtgatccccaggatacaagaaagcaccctgcctgaagcccacccaggtcttctttctcattctgcccttctcgtctgctccatacaacagccccatgcctctaaatctgtgtcccttgccacgccatcattctgcaattgccccaagctccttccattccactaacagtcccttgtccacgccccccacgcccagtcccannnnnnnnnnnnnnnnnnnncacacacacatcagccctaactcagatcccccctggctgtgaccctaggccaaatgtaagacattcccaggtcatgaaactgccctttctgctagaagtgccgaacctttaataggttcctggagacctcaggaagcaggggctgacccctgtcgttctctagacagagcaaggagctggcttgtccaaagagacacagcaatgaggggaggttgcttaagctagctgtggagcctgagggtctggcagagttgccaaaaggggggatggagcctggcctactctgaatcccaaccctgccgctccccagctgtgtgaccttcagctgttgctcaactgctctgaatctcagatttctcaattgcaaaacaagggagatttgggtaaacacttagcacagagccagaatgttgagcgaggcagcagcaggggagctcccactccacagccagatggcctggttcatgtctccgctcccttacggtgcggtgcctcggtttccaaacctgcataatggagttattagtcgtgcctgcctcccaggattgaggtaaggaagcaattcatctacaaaagcaaaatatttagaaatacccgggcaagtgatatcatcttttgggagatagttgagaaattatagatttaaaacattgcagggatggagaggtgggtcaatggttagagcactggctgctcttccagaggacccaggttcagttcccagaatccacatggcagctattaacggtttgcaaatctagtgtcagataatgaggtacagtgccatgtatgtgtggggtacatgcctacatgcaggcaagacactcatacatataaaatgaaaataaatcttttgttttgttctgttttcattttttggaaacagtgtttctctgtagagtcctagcagtcctggaattgactctctagaagagaatggcctctaactcagagatccatctgcctctgtctcccaaaccctggggttaaaggtgtaggacaccacccaccggcataaataaatattaaaaaataaaataaaaatgtttctttaaagagacagagagagaaaaggcacaagagatggctcagtgggtagtgtttgttgtacatgaggccctgagtccagattcataacccacactcacaggccagggttggtgttgcggacgatgaagaaacagagatgctagagcctctggccaaccaagtctaacagaaagtagaagcttcaggcttcacaaagagacccccatctcaatagataagcaataagtaaatgatggagaacagaggcagacaccccagtgtctctctgccctccacctgcacacacacgaaggagagaaactcttgctaagttcaaggtcaccaccttcagttcctcagccctatgtctgttcacacgcaatccacaacaaactggaggacaccttagatgagagtctggtctccccacagggtggccaggagagacatttgaggcacaaggagaaggagatcacctgaggtctctaggggcctctctgatactcagaatcctaacgccctttaggtccaccctcaatccggtctgccagcatccatccttaatacgaacctctcttgcctgcagacagctcttgccttgataatgagtcttctttgagaacgaggtactcacttgcgggttttttgagtcaaggacagagtaggtaaggaagaaacaagcctatgagatggtgggaataaaggacagagtcggagaggagattctgaattcggaggaaggagcagggatgggggagctgtatattggagacgagacatggagagtatatccagtgggcagatgaatccgtgtgtgtgagtgagtgagtgtgtgtgtgtgtgtgtgtgtgtgtgtgtgtgtgtgtgtgtgtgtcctccctcaagtctcctagtctcacaggaagaaatgattccatgggtgtttgttcttttcaagggaaaggttagccggggtgtggtggcgcacgcctttaatcccagcacttgggaggcagaggcaggcggatttctgagttcgaggccagcctggtctacagagtgagttccaggacagccagggctacacagagaaaccatgtttcagggagggggaaggaggaagaaggtcaagtttccctacactgagtccctgaggactctcactctcaccccaacaggaacccagcttttccacacaccaggcatcccagccagggacacagatgaaggcactgtcaacagaagcaccagctagaacttctgtgatcctgaggtcacatggcccacaggttcctccctattctgatttgtatgtgacccgatcacatttccttgcagatgttaggtttaccccttcccttgtgcactttgaaaatggctactgccagcggggggcgtggtgccgcatgcctttaatcccagcactcagaaggcagaggccagctgatctctgtgattttgaggccagcctggcgtacatagtaaattccaagatgcccaggagaaaaaggaaggcagaagcaaatggctatcgctctattttgtctactgcccactgatcccacaaagttccctgaccaggctgttgtggcactgtgtcacaccacagtgaccccaccgagttctcatctcccagtgtgacctacgggtagtctgccctgaagtggatacccaagtcctctatcacgagggcaggagaggggacttctcaatccatgtcacagcttgcctaggacagtgtacgttatgtttgctctaaacaaatatcattgtgaagctgaacagatgttgcagataaaatgccctaaaccctttccctacgtttcaaagaagctgggaactcaggcgtgctagtcttggatggtttctgcatctgtggtccagtaactggcacgcgcaatctctcttgcaaaggcagaggtgaattcttctggccccgggggtgttttctgcagcctggctagctccagacctgtaattaagtctagtggtatgctggcaaggatgtggagaaagaggaacactcctccattgctgatgggattgcaagcttgtacaagcactctggaagtcagtctggcggttcctcagaaaattggacatcgtattaccggaagatccagcaatacctctgctgggcatatacccagaagatgttccaacagataataaggacacatgctccactatgttcatagcagccttatttataatagccagaagctagaaagaacccagatgtcccttaacagaggaatggatacagaaaatgtggtacatttacacaatggagtactactcagctattaaaaacaatttatgaaattcctaggcaaatagatggatctagaggatatcatcctgagtgaggtaacccaatcacaaaagaactcacttgatatgcactcactggtaagtggatattagcccagaagcttagaatacccgagatacaatttgcaaaacacaagaaaatcaagaagaaggaagaccaacgtgtggatacttcattcctccttagaatagggaacaaaatacccatggaaggagttacagagacaaagtttggagctaagacgaaaggatgtaccatccagagagtaccccacccggggatccatcccataatcagccaccaaacccagacactattgcatattgccagaaaggaccctgatatagctgtctcttgtgaggctaggtcagggcctggcaaacacagaagtggatgctcacagtcatctattgaatggaacacagggcccccaatggaggagctagagaaagtatccaaggagctgaaggggtctgcaaccctataggtggaacaacaatatgaactaaccagtaccccccagagctcgtgtctctagctgcatatgtagcagaagatggcctagtcggccatcattgggaagagaggccccttggtctttgcaaaccttggtacaggggaatgccagggccaggaagcgggagtgggtgggttggggagcagggcgggaggagggtatagggaactttcgggatagcatttgaaatgtaaataaagaaaatatctaataaaaaagtctagtggtggagaatcacccaagtgggaaccatctttgctcctgcactacagctctcacaggactggtagacatgccatcttgttcgagctaccacctctgtctaccacctaccctgcccgtcatgctctggctctgctgggttggccgttgacaatctctggactagaaagcctggtcagggaatgaacgcgatgagaactcgtgcctgctctaaccacagtctctctctccatcaccccagcagagccaaccctaagcagactacgaactagaagagcttccgagctttaggttaaacacagcagagcaggggaaacacaggaatcacgagggatcgggagggaggggaggttttgaggaagggaggaaggaaggatgtgctgacatttgcttagtgtccattctagggatccacctggcactgaatccacaagtgaggaagccaagggtgagagcaggctggtgtaactgactcatggtgacacagccagcagctgtgctaagattatattccctacttcatttatactgtgtattgaaaccttaccttattgaagtctgtcctgtctgtctgtctgtctgtctgtctctctctctctctgtttttttttttttttttttttttcgagacagggtttctctgtgtagccctggctgacctggcactcactttgtagaccaggctggcctcgaactcaaaaatctgtctgcctctgcctccctcccaagtgctgggattaaaggcgtgcaccaccacacctagccttattgaagtgttttagcaatcctattgaaggcccattttacagatggggaagtaaagcccagagaggggaaagtgccaaagccataaggcaataaaactactaaaggatgtcagccagttctagctggcctccaaaggccaatttgcatctgccctcttgctgcaccatttaaccacatagttgcctactcttatcaaatccaatcaaatgcagctaggagctaggcactgtgctgggtgtacatagcatctctcaaagcacgctggatgcagagttctgtcctgggaggaggcacggtcgaatgagtaccgccttcagggagcagggaaacagcccggctgtgataggctgtccactccttcttcccactgggccctgcttctctctcaggccttcttgggcctcctggctctgccatggagccactgggcaacatgaacaagtcacctgtctgctgcagctcctctagagcaaaagaaagttcctagatggagtgagttttacacccatcccctgcggttctgaggtgccttgggcatattgactgggtggggtcagggagcccacatctcagggcatgttgacgcctggaaggggtgcaaagtgcctgggtgaggggctgaggaagctactccacccccagctgtggtttctggtggggccactggtggcagcaggtgaggggaagtatctgtcactcttccaacaaaggcaatcaaacaaaagcctcctggggcattgtgggaactgcagtaaaggcgccaaaaataaaacacaactttcctttgataggcactggtagctgcctgggggttgtgacaaaagtgttcagatttcacacctcagttcataccccacacacacacacacacacacacacacacacacacacacaccagtctcacaaacaagtcatataataggcagtcaatgatcccagaagaaacatctccgtgggctgtgacacatgtcacaagaaccacatatgtgtcaaatggcttgtcctttccattttgaaatgttcaatattttaaaagaacttttaaatatcctattttatttcatgtatattggtttttgtctgcatctatgtctgtgtaccctaccattcacaaaggccagattagattccctggaactgggattatagacagttgtaaactgccaggtgtgtgcctggaatcaaacttgggtcctctgaaagagcaatcagtgcttttaaaatatatatacatatgtgtgtgtgtgtgtgtgtgtgtgtgtgtgtgtgtgtgtgtgtgtgtgtgtgtaaaatttattttatgtatatgagtacactgtcgctatcttcaggcataccagaagagggctttggatcctataacagagggttgtgagccacagtataattgctaggaattgaactcaaggcctctggaagaacagccagtgctcttgaccactgagccatctctccacccctaaagttttcagtatgttttaagcaaggagctgaacggggtattttgttctttgtccttcaagctacagaaccaaacttgctagcattcattcataaatattcatatgggcagtatgcctaaaaattataaaatactgataggcaaaagtgcatacattgcccacacagcgagaggaacagacacatagaccccccccccccacacacacacacacactggtactacaggggctcccctgtgtacacacactgcagtacaactgcttcccccataagggacattgacacccactcgaaaggcccagagagagctcaaccacaacccagtgacatgaatggattgacttagccagatcaaggcacctcgatggcactgaaaggaagggcttaatctcctttactgtatcttcaactgtcacagctggcctctctttcgggctatgggctcatccaccaacccttgcagcggagactaaggaaaaggagaccttggggagtagaggaatccttgggaggagaggttgggaggaggagaagaacattagccaaaaacagcaggctgggcgacaacggaggcgcctagtgaactggcctgagtggtggttctgaaagagcctgggggaggcgggggcaggtcttgaacccagacaagtccgagctcctgctctcacatgaacagccaatcccttgccccactcctctttctagctaggtggccttgggcacatggctgaacttgcttggcctcagtctccatctccacggaatgagaaagtattgtctgcatggcagggttgtgtggtgcatgtggaagttgcggcctcatcttctgggctctcccaacattcaacagtttgccttctttcccggccttgcaatccgactcttgcttcagaaactccagaccccctcattaacggcagaccttcagaatgtgtttatttcttgtctccccacccccaccccacttcccagccagatgcaagcatgggaggtggccgtagttcaaggcccaccctcccttcggggactttcaacgttcctcagttccttttgatcccatagctccagccacaagccaaacagcccccaaggcctccaaagttttctgcctgtgctctctacccctaaccccagtgctgcctgtaagaaaccgttccaggctctgcccagaagcccctccatcctgttaggtgataccagatgctcaaagagtgacccagaaaaacaattcttttcagctcattgtgatggtgcacatctgtaaccccaccacgctgaggaggctaagggagaaagagagaattctcggccagcctgggctacagatcaagaccctgtctcagaaaaattccaacaaaattgctggggaaatattgctcaaccatcggaatgcttacatagcatgcatgagtgcagnnnnnnnnnnnnnnnnnnnnnnnnnnnnnnnnnnnnnnnnnnnnnnnnnnnnnnnnnnnnnnnnnnnnnnnnnnnnnnnnnnnnnnnnnnnnnnnnnnnnnnnnnnnnnnnnnnnnnnnnnnnnnnnnnnnnnnnnnnnnnnnnnnnnnnnnnnnnnnnnnnnnnnnnnnnnnnnnnnnnnnnnnnnnnnnnnnnnnnnnnnnnnnnnnnnnnnnnnnnnnnnnnn

SEQ ID NO: 20 - DNA, 2072 bp, Mus musculus
ggacatggactgctatctgcgtcgcctcaaacaggagctgatgtccatgaaggaggtgggggatggcttgcaggatcagatgaactgcatgatgggcgcagactgggctagctggagagagacaagaaccaaaagcacagccttcctgtgtgatttctacagcccccagagcaccatggacccagggaaacccaggaaaaacgtgctggtggtggctctccttgtcattttccaggtgtgcttctgccaagatgaggtcaccgatgactacatcggcgagaataccacggtggactacaccctgtacgagtcggtgtgcttcaagaaggatgtgcggaactttaaggcctggttcctgcctctcatgtattctgtcatctgcttcgtgggcctgctcggcaacgggctggtgatactgacgtacatctatttcaagaggctcaagaccatgacggatacctacctgctcaacctggccgtggcagacatccttttcctcctaattcttcccttctgggcctacagcgaagccaagtcctggatctttggcgtctacctgtgtaagggcatctttggcatctataagttaagcttcttcagcgggatgctgctgctcctatgcatcagcattgaccgctacgtagccatcgtccaggccgtgtcgcgtcatcgccaccgcgcccgcgtgcttctcatcagcaagctgtcctgtgtgggcatctggatgctggccctcttcctctccatcccggagctgctctacagcggcctccagaagaacagcggcgaggacacgctgagatgctcactggtcagtgcccaagtggaggccttgatcaccatccaagtggcccagatggtttttgggttcctagtgcctatgctggctatgagtttctgctacctcattatcatccgtaccttgctccaggcacgcaactttgagcggaacaaggccatcaaggtgatcattgccgtggtggtagtcttcatagtcttccagctgccctacaatggggtggtcctggctcagacggtggccaacttcaacatcaccaatagcagctgcgaaaccagcaagcagctcaacattgcctatgacgtcacctacagcctggcctccgtccgctgctgcgtcaaccctttcttgtatgccttcatcggcgtcaagttccgcagcgacctcttcaagctcttcaaggacttgggctgcctcagccaggaacggctccggcactggtcttcctgccggcatgtacggaacgcgtcggtgagcatggaggcggagaccaccacaaccttctccccgtagggggctcccctgcccggactacaaggacctctcccaggagccttaatgtggtgcacacatgcacagactctccatccaccgaattgctgctgagggaagagcaattctggccagtcaggttgacatgaggacctaagaaactgcttaaccccatcccacttataactacctcaaccaaagctgtaaaagatatggctgagaagttaacactcaagccaagacagctatccccaaaacgacagccaaaagtgaaagtgagaggctccacactttccggagtgagggatgtggggccagtgaacaccctggttgagtagtcttcggaggcctctgaatgaacctgcttctagcttagagagatgtcccggagattcaagacagagcttatctccacacttagcaagcaagcaagagatgacagtctctctaaatgctcccacagagcacccctgcccctcccttctgcctctccaccgcctttcctgaggtccaggccacaccatgacgctgaggcagtcccagctggggctctggatggcaatgacaagtagttgggtctctatgatgggaataaaaaggtaggggaaaggtgacaggaaggagagaaggtgaccctgctggctgacagaggccagcaagctacttctttgttctctgtcagccagccactgatacctttcctcatgttctgcttttgattcatatatcttttatgaagaaacaaataaaaaaaaaattttccctcgaggaaacaacttgg

SEQ ID NO: 21 - DNA, 1137 bp, Mus musculus
atggacccagggaaacccaggaaaaacgtgctggtggtggctctccttgtcattttccaggtgtgcttctgccaagatgaggtcaccgatgactacatcggcgagaataccacggtggactacaccctgtacgagtcggtgtgcttcaagaaggatgtgcggaactttaaggcctggttcctgcctctcatgtattctgtcatctgcttcgtgggcctgctcggcaacgggctggtgatactgacgtacatctatttcaagaggctcaagaccatgacggatacctacctgctcaacctggccgtggcagacatccttttcctcctaattcttcccttctgggcctacagcgaagccaagtcctggatctttggcgtctacctgtgtaagggcatctttggcatctataagttaagcttcttcagcgggatgctgctgctcctatgcatcagcattgaccgctacgtagccatcgtccaggccgtgtcgcgtcatcgccaccgcgcccgcgtgcttctcatcagcaagctgtcctgtgtgggcatctggatgctggccctcttcctctccatcccggagctgctctacagcggcctccagaagaacagcggcgaggacacgctgagatgctcactggtcagtgcccaagtggaggccttgatcaccatccaagtggcccagatggtttttgggttcctagtgcctatgctggctatgagtttctgctacctcattatcatccgtaccttgctccaggcacgcaactttgagcggaacaaggccatcaaggtgatcattgccgtggtggtagtcttcatagtcttccagctgccctacaatggggtggtcctggctcagacggtggccaacttcaacatcaccaatagcagctgcgaaaccagcaagcagctcaacattgcctatgacgtcacctacagcctggcctccgtccgctgctgcgtcaaccctttcttgtatgccttcatcggcgtcaagttccgcagcgacctcttcaagctcttcaaggacttgggctgcctcagccaggaacggctccggcactggtcttcctgccggcatgtacggaacgcgtcggtgagcatggaggcggagaccaccacaaccttctccccgtag

SEQ ID NO: 22 - DNA, 31670 bp, Homo sapiens
aatatatgaaacaaatattgacagaattgtcaaagaaataagagaaacacataaagcaagaaataagagaaacacataattcaacaataatagaaacttaaatatcctcctttcaataatagatacaacaactaagcagttgatcaacaagaaaacagaagatttgaacaatgctatgaaccaactagacctaacgtctatctataaaacaccacccaacaacagcagaatacatattcttctcagatatacatagaacattctccaggataggccatctgttaggacataaaacaagtctcaaaaaatgtaaaagaattgagatcagacaaagtctgttctctgaccacaaccagtaacagaaggaaatttgaagaatccataagtatgtggaaatgaatcaaggaactcaagggaaattagaaaatactttgaaatgaatgaaaatgaaaacacagcataccaaaacttatgagatgcagctaaaatagtgcttacagagaaattaatagctattaatgcctgtattttttaaaagaagaaagataccaaattaaaaaaaaacttttcactttaagaaaaagaatagtgaaccaagcccaaatcaagcagaaggaaggaaataataaagattagaatggaaaaaaatgaaatatggaattggaaaaactagagaaaaattaacaaacccaaaagttgttatatcaaaaagattgataagtttgataaacatttaactagacttaccctaatatcaaaaccacatacagatatcacaagaaaagtacagaccaatatctctcataagacacatataagatagatgcacaatttcttaacaaaatattaacatgccaaatccagaaacattacaaaaaaaattgtataccatgaccaagtgatttattccaggaattcaaggttggtttaatataaaaaaatcaattcatataatacaccatatttaatagaataaagggcaaaaacactcaattgtctcagtggacacaggaaaggcctccaactccctccatgtccctccaaaggacattatctcattcctttttatggctgcataatattccatgatgtatatgtagcacattttctttaaccaatctatcattgatgggcatttaggttgataccatgtctttactattgtgaatggtgctgcaataaacatacacgtgcatgtgtctttataatagaacaatttatattcctttgggtatatacccaggaatgggattgctgggtcaaatggtatttctgtctctaggtctttgaggaattctatactatcttccacaatggttgaactaatttacactcccaccaacagtgtaaaagcattcctttttctccacatcaccagcatctgttattttttgaatttttgataatagccattctgactggtataagagggtctctcactatggttttgatttgcatttctctaatgatcagtgtgttgagcttttcaaaatatgattctgggtcacatgtatgtcttcttttgtgaagtgtcttttcatgtccttggcccactttttaatttttttttcttgtaaatttgtttaagtttttatagatgctggatgttagactttcgtcagatgcatggtttgcaaaactttttttcccactgcgtaggttgtctgttcactctgttgatagtttcttttgctgtacagaagctctttagtttaagtagatcccttaatttacttatttgtcaatttttgtttttgttacaactgcttttggcatctttgtcatgaaatcttggcccgtgccttggtcctgaatggtattgcctaggttttcttctagggtttttatagtttttagttttacatttaagtctttaatccatcttgagttgatttttgtatatgctgtaaggaaggggtccagttccaattttctacatatggctagccagttatcccagcaccatttattaaataaggaatcctttcgctattgcttgtttttgtcacgtttgttgaagatcacgtagttgtaggagtgcagtcttatttctgggttctctattctgttccataagtctgtctgtttttgtatcagtaccatgctgttttggttactgtagccatgcagtataggttgaagtcaggtagcatgaggcctccagctttgttctttttgcttagggttggcttggctatttgggctcttttttggttccatgtgaatttttaaatagttttttctagttctgtgaagaatgtcaatggtagtttaatgggaatagcattgaatctataaattgctttgggcagtattgtcatttccacaatactgattcttcctatccatgaacacggaatgtttttccatttgtttccattatttctaatttctttgagcagtggtttgtagttctccttgtagatgtccttcacttcccttgttagctgtattcctaggtattttattctttttgtggcaattgtgaattggagttcatgcgtgctttggctctctgcttgcctgtttttggtgtataggaatgctagcaatttttgcacactgattttgtatcctgagaatttgctgaacttgcttatcagctgaagaaacttttcggctgagacagtggggttttctagatataggatcatgtcatctgcaaacaggaatagtttcacttcctctcttcctatttgagtacactttattcctttctcttccctgaatatgactgccctggccagaacttccaatactgtgttgaataggagtgatgagagagagcaaccttgtcttgtcctgattttcaaggggcttacttccagcttttgcccattcagtataatattgtctgtgagtctgtcatatatggctcttattattttgaggtatattccttcaacacctactttattaagagtttttaacatgaaggggtattgaattttatcaaaggccttttctgcatctatggagataatcatgtggtttttgtctttagttctgtttatgtgatgagtcacatttattgatttgcatatgttgaaccaaccttgcatcccaggggatgatgaagccaaatttgatcatggtggataaactttttgatgtgctgctggattcggtttgccagtattttgttgaggatttttgctcaatgttcatcaaggataatggcctgaagttttctttttttgttatatttctgccaggttttggtatcaggatgatgctggcctcacagaatgagttaggaaggagtctctccttttcaatttttttgagtagtttccgtaggaatggtactcttttctgtacatctggtggaattcagctgtgaatccatctggtcctggactttttttggttggtaggctgtttattactgcctcagtttcagaactcgttttcagtctgttctgggattcaatttcttcttggtttggtcttgggagggtgtatgtgtccagaaatgtatccatttcttctagattttctatgcacatagaggtgtttatgatattctctggtggttgtttgtatttctgtgaggtcagtggtaatatctcccttatcatttctgattgtatttatttgagttgtctcttcttcttctttattagtctaactaacagtctatctattttattaacttttttgaaaaaccagcctggattcattgatattttgaatggttttttttttatgtctctatctcctttgattcagctctgattttggtcatttcttgtcttctgctagctttgggacttctttgcccttggttctctagttcttttagttgtgatgttaggttgttaacttgagatctttctagctttttgatgtgggcatttagtgctataaatttactccttaatactgccttagctgtgtcccagagattctggtatgttgtatctttgttctcattagtttcaaagaactgcttgatttctcccttaatttcatgatttacccaaaagtccttcaggagcaggttgttcaatttccatgtagttgtgttgttttgagtgaatttcttagtcttgagttctaatttgattgtgttgttgcccaagagactgtttgttatgatttcagttcctttgtatttgctgaggagtattttacttccgattatgtgatcaattttagagtaagtgccgtgtggtgattagaagaatgtatattctgttgtttgggaatggagagttctatagagatctatcaggtccatatattccagagctgagttcaggtcctgaatatctttgttaattttctctctcaatgatctgtctaatggggtgttaaaacctcccactattattgtgtgggagtctaagtctatttgaaggtctttttgagcctatgtctgtctttgcatgtgagatggatctcttgcagatagcataccaatgggtcttggttttttatccagcttgccactctgtgtcttttaattggggcatttagcccatttacacttaagattagtattgttatgtgtggattcaatcctgtcatcatgatgctagctggttattttgcagacttgtttatgcggttgcttcatagtgtcactggtctgtgtacttcagtgtattcttgtagtggctgataacagtttttcttttccatatttagtgcttccttcaggagttcttgtaaggcaggtctggtggtaatgaattccctcaacatttgcttgtcctgaaaggatcttatttctccttcgcttatgaagcttagtttggctggatatgaaattctgtattggaatttctttcctttaagaatgttgaatattggcccccaatctcctctggcttgtagggtttccactgagaggtctgctgttagtctgatgggcttccctttgtaggtgacctagcctttctctctggctgcccttaacattttttctttcatttctaccttggagaatctgatgatcatgtgtcctgggaatgatcttctcatggagtatctcactggggttctctgcatttcctgaatttgaatgtttgcttgtctagctaggttggggaagttctcctggaaaatatcctgaaatatgttttccaaattgtttccactctccccatctctttcagataccccaatcagtcatagattccgtctctttacataatcccatatttcttggaggttttattcattccttatcattctttttctctattcttatctgcccgtattatttcataaagacagtcttcaagctctgagattctttcagaggaagaatctttcagaggaagactaagcagaacttggcctattcttctatgaatacttctgattgcattgtgaagttcttgtagtgtgtttttcagctcgatcaggtcagttatgttcttctctataatatctattttggctgtcagctcctgcattgttttatcatgatttttagcttccttgcattgggttacaacttgcttctttagctcagcgacgttcatttttatccacattctgaagtctacttctttcattgcagtgatcttagccttaccccagttccaaacccttgctggagagatgctgcagtcatttggaaggaagaaggcactttggctttttgagtttttagtgtttttatgctgattctttctcatctttgtgggcttatctacctttgatttttgaggttgctgacctttggatggggttttggggtttcttttgtttttcttttaacaatctggccacttttccataaagctgctgtggcttgctgagggtcccctccagactctagtcactttggattttccagtacctggaggtatcaccagtgaaggctgtgaaacagcaaaaatggcaacctgccccttcccctgggagctccatcccagggaggtatgaacctattgctggcctaaacacacctgtaggagatggccggagaccccatttgggaggtctcacccagtcaggaggaacaggattggggagccactgaaagaagcaatctaaccacacttccgaagagaaactatgctatgctgggcaccacttgcatccccagttggcttgggatctccaaagcctggagactggtgtggctaagtcgccaaaacagcaaagatggcagcctgcccctcccccgaggagctctgtcccaggaagtcttcaaatctctgtcagccagagaacatcgacaggagtggctggaggccacagttgggaggtcctgcccagtgagaaggaatggattagggaccctcttaaagaagcagtctggccatattttggtaaagcagctgtgccacgttgggagatcctttcagcccccagttggtttgagctccccaaagctgaaaggctggaatggctgggatgcccaaacagcaaaggtggcagccctctccaccatccaggcaccctgtcccagggagagatcaaaattttatgggctgtagaaaatgggcagaggtggctgaaggccttgtttgggaagacccacccagtgaggaggaatggataggagtcctgcttaaaaaaacagtctggccacgttttggcagagcagctgtgctgtgctgggggatcctttccacacctggtgggtttggactctccaaagtctacaggctggaacagctgagtcgtccaaacagcaaaggtggtgcccctcacccccaccccagccacccccagaactccaccttgtctcaggtaggtgctacactgttgcccgtggctggctggaattccaagccagttggtcttatctggtgaggtgctgtggaagtgaggcccacagaccaatgctgctcagctccctggattcagcctccttcctaggggtatgtacagacctcctgccttgcctgaatggcggtcacctttgctggggttccggagcctgagtatgtaaagctcctgggtgtctgtgcatgcctgagcagctgctctgccaataatccaatgcagctctgtgtgtaagacccaaaggcctggtggagtgggttcacaggggatctcccgatccaaaggttgcaaagatcggtgggagaagcatcattccccaggtttgcacattcactcaccacttccctggtggggggaggggagggggtttcctttgggtctgtgttgctcctatgtaggccattgccctgccctgctttcctctatcctctgtgggtcgagctgattccttaatcagtcccaatgcaagtatctggatgtttcagataaaggttttgaagtacccacccctttgttcctctctgagagagccatgccccatacctgcttctagttggccatctttgaaaataaaattaagaaaacaatttcatttacaagcacatcaaaaagagtaaaatacttaagaaaaaatttaacaaagaagtgaaagacttgcagcctaaaaagtataaagaaattaaggaagacctaaataaatgaaaaaaatcccatgttcatggaccaaaagactttgttagaatggcaatactccctaaattgatttacagattcaatgaaattcctattagaatcccagctggtttcattgcagaaattgataacctaaaattcatatggaaaagagagagatgcagattagtcaaacaatgtttaaaaagacagataaagttggagcagtcacaactcccaatttcaaaatttgctataaagctacagtaatcgagacagtgtggtactgtcataggacagacacagagattgataaaatagaattgatagtctagaaataaaccattacatttatgatgaattgatttccaacagaggtgctaagacagttcaatggtggaaaaaatagtcttttcaacaaatgatgctgggaaaactagatatccatataaaaaatgaagctggatccctacctcacaccatatgcaacaattagctcaaaatggatcagatctaaatgttgcagctaaaactataaaagtcttaaaagaacatatacgaataaatctttgtatacttgaattatgcaatggtttcttagatatggcaccaaagacacaattgacaaaagaaaaataaatcaattgaacctccacatttaaaactttgcgcttcttttgccagagattcaggttttaaaaaacaaaaagcctttgtgcttcaaaggacgctatcaagaaagtgaaaagatgatccatagtaagggagaaaatatttacagatatgtatcagataagggattgtaaccagaatatataaagaagtcttacaactcaataataaaaaataaataacccaattttttaaatgggcaaaggatttgaatagaaatttctcaaaaaataatacaaatggtcaataagagcatgaaaagatgctcagcataggtagtcattaggaaaacgcatatcaaaactacaaagaggccgggcatggtggctcatgcctgcaatcccagcactttgggaggccgaggctggcagatcaccttaggttaggagtttgagaccagcttggccaacatggtgaaaccccgtttctactaaaaatacaaaaattagccaggcatggtggcacgtgcctgtagtcccagctacttgggaggctgaggcaggagaatcacttgaacccaggaggtggagactgcagtaagccaagatcgtgccactgcactccagcctgtgcaacagagtaagactccatctccaaaaaaaaaaaagaaaaaagaaaaaaaacacaatgagataccactttacagccactaggatggctagaatcaaaagaatggacaatagtaagttttgttgacaatgtggaaccctcacgcattgttgatgggaacaaaatggtgtagtcactttggaaaacagtttgatagttcgtcaaaatgttaaatatataattaccatatgactcaacaatttcacttctaggtatatacccaagagaaataaagcatatgtccacacaaacacttgcacataaatatttatagcagcatcattcataatagctaaaagggaaaacagcccaaacatccaactgatgacagacaaacaaaatgtggcatatccatacaatggaatgttattcagccataaaaaggaatggggaatggatccataccaccacataggtaaccttgaaaacactaactgaaagaagccagatgtgaaggtcacatattgatacttctatttatgtgaaatgttcagaataggaaaatctatagagccagaaagtagatttgtggttgccaggggctttcgatgacaggaggggaggggagcagtcattgctagtgattacagggttcttgagagggagtgagaaaaaatgttctaaaatgtattgtggtgatggttgcataactctgtgaacatacaaaaaccattgaattctatactttaaaaaggtaaattttatgggatgtggattatagctcaataaagctgtcattaagaaaggaaaaggaagggaggggagaagagggaaaggggagggaggggaggggaggggaaggggggagaaaaaagatacatcgtggcatatctcttcccttttacctgtcattatgtgtcagtgcctcccattggcctaaactacccagaagccagagggaaagccatttgggactatattccactgtgacactgagcagagcaagggaaggatggggacacttctctcacacatctctgactccccaacatctaacccatggcctggcatgtgatattcatgctataaatatttgttgaatcagtaaatggcccctcatctagattctgccaggcagcgcagggggctttttgaatgtaaatgacctaatgattcaggatcctatgaccagcgactgtcaccctctgtcacctttcttctgcccctttatctctgaaggcattgaaggggccctgcatgagtcagggagggctggggggaggagcaagggtgggaggggcagggaagagggtggcttctccgacaacttaaaaggggcttgaaccacttcctccccagacaggggtagtgcgaggccgggcacagccttcctgtgtggttttaccgcccagagagcgtcatggacctgggtgagtgagcctcttcatgtgagaaggaacagtaccagggtcttggacacccagactgaccctgtggaatgggggtggaggatgcgggtggagcgcataggggtgcttcctggagaaatcagttctgatttggtgggcattggaagctacttccagagaatgccccctgctgtcccaggaggggtgcacctgccctttcagacctggagaaggggtcagcctttggtgccagtggggacaagggaggggccgagatcatgtctttctaaaacagcagggacataagagagtggcggggctgggcttggtggtctggcagaacctgttctcatcatgagggtgataggttaggccctctgggacctctggggacaggtttcaacagagaaattctccctagagagcttaggaccttttacccactctctgattcccacctttctcccctgccaaatattcatatacctgtccacttggggtcatgaggagatgcaaatgaaacgtgactgggttgtgagaatggtgcggtgcattgcaaatgcaagctctggttgctttctctctgctgcacatcccacctgctttgatctggctttgctgttgcctcttgcaagttaaggaacgggcaggcaacatggaatgggatggcaaggggcactcagcttggagaaatcatagccaggccttcagcacagcccctgcccctgagcaaacctcacgcactctgccccggcagataactctactctttagaaagccctttctcaggtctaacctagaaggggtcaaggggaagcactgagggtgttctgagtggttcatccagctccagacgccccctttataaatctcagctgtggagtcagaccaggctgaggctaagaagaccaggttcctagatggcttgtctcaccagcaaacaatgcaccacggcggcctcaaagccgcaaagggttggctttaaaaagtgaaggttccctggtgctgtcctcacacccctcctcgccacaccacagcctccttgatttcatctcttactttcccgcctgccctgaacgctggatctggacccagcaaacagctgtgaaagggttaaagtggtcaccccacccactgactgtgaactcctgaaaggcaggttcaggtgctttgaggatgtgaggagaaaatgtctgcggaatgaatgaatacaccgtatcaagaactccgtagagtttagtttttgaaaatctcttccaaatgcctcatttcccagccaatctacccttaaatcccactcccctgcaccccctccaccaccccccatcacaatcccacagtacagacgtcacccacagaagaccctgctccagcctttcatactggcctccaggaaggaaaccaagcagtgcccagtggtgtgctactgggcatttgaaaagcagctccccggggtggagcactggtagctgactccagggtggagggaaagtcctgaatttgtagtgcttgccaatttccatggtgtaaattctcccaccctggctgattgatttcaagccatctacatgactgaacagggggttgggaagatgtgcagagtgtcttaccccagactaggtttaggggtgctagactcctaggctttgatgcagggagagagggtaatctctggtccaggaagaagggatattcttgccacttcactcaacttgagagagccccaacggtcaaacccgaaatactggtaggaggggaagccgctgacaagctttactcaaaacgggctctctgggccgttgatggggtgggtgggccttggaggatctgttgttctgctcttcatctgcccagcaaggagcaagaggtgggtgaggagggagggtttctgttacacaaaatgaaaactcccaagcagggctgagctggcctttttcacggtttgaatgagcagctctgaggcaccctccccaccttcgagcaatgagaccgaagatctttcataattctcaaaagcaaagcaaggaaaaaatgaacccatgagagatgtgtgcctcacagctcggacataaatggtggcaaagggggatgctgaagctaattcagggccagtttcttgcctgccagaaacttggctggggaggagaggaacgctgcagcctggggtcgctgttggaaaaaatctctcctctttgcttcggacattcaggcaactctcattgtttgagggattcagggatgaccagtctggtggggagagtgacacatatgtcacaaagccactgcaacagaataagatacagcattgaccagggcaagggcaagacaagaagggaatagtgaacctgggtcagagaggtatttaaggtgggttttcaagggtgtgtaggagttgtcaagcccaacaaggagctgcaatgggcccaggatgtggcaggaatggcaaactccattgccatcagaggccgacaaggtaatagagggaatgggcataaggtgcaggaagtggaggggagtagagtgacccagagggtgcatgccccacctaaaggcattcaaatctattatttcaaaaactccatgctgacaagcagagtgtcctggggactaaggctgcagccgtgtagatggtcagctgagacaacagtaacagagacaagaaagaagcaagcggaggggagggtggagtagctggccatgccaaggaggaagatgaggaggaaggacgcaggcacaggagacccaatccttaaaacgtggtacggcatccctaaggaatttgaactttatcctgaaaacaatggggacccatcaaagatttttatttttcaagtaggtgaattaaaggatgagatttgtgttttggaaggagttctgtggcagcaaagaggcagcaaagcccgtgtcagaacagaggtggggccggctcttttgggggccgggatgttgggggatggaagcaggaagcactggtggccagtggggcatggggagcaaagattcccctcatgctccgtggagcgtcctagatgcagcaggctcatcagaaacacagcctgatgcagtagccagagcccaaaccttgctatcctgttcaaatctcaggtccctctcttagcagctgtgtggccccaggcatttggcttaatctctctgggcctctattttctggaatctaagatgaggatcaccagggtagctcatgagatgttatgagggagagacacatacagacccagtggccgcacagaaggatggttaggagtgtggttgctggagttggagggtttcaaagcctgctcccctgctggccattgtgtgactctgagaaagttacttgctgtgtttcagtttctcattggtaaatggggataatagtagcgcctacctcatggggcttttgagaggatgaaatgagaccatacatgcagacagtgtggcacgcagtgagagctcagtgaatatgaattatctcattggatacagcagttgataacatagaaaatgcaaggtctaccaggctctcacccatccctgcctactgtctgaaagtggattccccagatctctagacctctcaccacctccctgcttctcctctgcctcccttatccaaaaaaaaagagagagagagaaaagttgtgttggcaggtgaggaagttcaaagaggaaaaagcttggggtcgctcttggggcgagctgattgggcaactgtgatttcctgggcagtctggaggacctggaaaaatgtggggatggaagttcatggtttggagatgggggcagccagccaataattttctttcctggatgggcagtctctcatgttgggggctccggttggagttctagggaattttcatgatgatcattactgaaaactcaagaactcagaaaacacccaacatctaggtcaaccactccttagccccagagattcccaacttcattggtctcactgaagctgctgcccaagaccagtttctttatgactttgtaacagacagggatgatctgactcaaggccactgaccaggctcccttttgccacatacaagagttcccctaagtttccctgtgatgtttcttgaaagccacctgttttggacctacaagacccttgctcatccacctcctccaaaacacctggaatgagaaatcacaggcacacacgccagcactcccccaactcccctcccctgacgggaacagcaggagtgggacagcgtccgggagaaggggttatcaacagagttcaacagaaacacagttcttgctcctcagatctcacccgttgtgacttatcaaaactttgaggtttctcatttctccctgacagtcagagcgggctttctctagagtaaccgaaagacacttacgtgttttaaagaaacctcgagactcgacctctagatgagtcagtggagggcgggtggagcgttgaaccgtgaagagtgtggttgggcgtaaacgtggacttaaactcaggagctaaggggtaattcagtgaaaaaggggaatgagcggtggggagctctgttgcaacagggtccaatcgcagcaggactacaaatgcccgagcgcaggctgggaacgaggggacagcggctgcctgtccccagaatagaaaatgcagctaggaagccctctttgagtggacagcggaggactggactgccaggccaagcatcaggggcttcatcctcagggccggttagagcccctgaggatttaggaggaaggtgaggtggggactgccatcagagctaagctttaggcagatgtgtctagcagtagtgtgcaggactatttgctcaaggcgggagaaatacctatttatttatgtagcccgatgcagtctctccttcccggaggaactcccaagcccagaatccctggctttacacaatttccggggaacacattaaccaactgcaacctgggtgccatgcagggaggcttccagcaggtggtgctgtggccaaggacacggaagcgctgggctctcactgcttccccagcctccaggagaaggtgccttaaacaggttcccacgcatttcctggcgctattgagcttggagctgccaagggcctgccttcacttgtggcatcgcagttactgactctccagtgggccaggccctacctagctgggacctgagggtcaggatacgggaagagggctactgccgccctgacttgtaggtaagctaaaacatctaggcaaattactctgtcaactgtcctccctgctcagcctcaggaagaaataagttcctgctgggccccaggctcagccacaaaaccagactgagcacatctgggccttgtgctacaccggggtccccatcagctgctcagaccccaggaagcctcctgacttccagaacacgtcgcttcccaaagctgaccctgttccccctttcacctgccccccaagcctaagttagaaaacaagttaaaggagagaaagtgtgtgcaggcacttcagttaagcaaaaaaataaagaagtcgtgacatcaggaaagagcgtccttcccccacactgcaacaggacagcatcccttctgtgtcctctcgggccatcttgatgccctctcccttggaaaaaggacaggcattcgtttacttgtcattcatgtatttattcatcattcatgtatttatcattcatatattcatcagcacacaattgtggggcacctcctcaattctgggcctgcacaagataaaagggaagggatctctgtcccaaaggcaggccaagggtgtgcgcccagtggaccaacagtcagtgctgaatgaatgtcatttcagtgagggggtgttgtggagctggtggagccctgaggcagtctccatcgctgtggaccagtaaggaacctcatccctctacccagcctgtgaggtcatcctccttcctcagcccacctccctcaggagacactcaggcttggcttcatgcacgtgtggctgcgcactcacctggatgccaggaaaatgctcctgggccagtggctaccagcaccaaagcagggctggaaacgtgtgcacctaccccacgacctcatagctttgccgcctcatcccacatcaggtggagtgggagggggcactcagacccaccaaccaagctcagtcttgaggggtggtctgggctagagaagacttcccagctccaagaagcagcccagatgggccaagacagggggtgggaggggctgccctgcattctgatgctgcttctttccaggacctgggagtggaggaggacaagaaggaggtgaggacagtgatgccgggcagcaggccaggtgttcaaaggcacaatctggttctgatgttctctttcagcaaacacagtgcctggagcttgggaggaaagttcccaacagcgtctccccctccactgctttctttaataacaaagacttgtccctgccaagcaataactttctcgccttgtctcctacagggaaaccaatgaaaagcgtgctggtggtggctctccttgtcattttccaggtgaggttctctgccaaggaaagctctgttcccttctccacacggcctcccaagtcaggggtttagtggaggagctgggcatttgctagaagatacaagacccagacataagcccgcctgccactcattaagctaatggctgccccctcaccatctgctgagtgaccctggagagccacagatgttctctggacttcctttactccatttaggttaaaacatgggggaaaataacttaccaccttccctatcccacctccaatctccctgcccaggagacagaaatatggactctgagttcttagagagagaagagctgcaaaaagcaaaaaatgttactgggttttgtgcacgtgtgctgagaaaatcaccctggatctggcgatcttgttactatcctatcgccccaaagttgtctctttccaaccttcacccaaaggcttccctcgcagcccccgttttctttggtgaaatagagacccatccggcctccctggcaggggagggaagagaggatggggccctagggatggggagaggggtggatgagcacacactttatagcaggcctgaactcggcaggaacaaagaccctcactttacaaagttctgtttctccatccagaaacagacagaaagtgtgcctcaccaagtgccaaagttagaagaaactgtaactcgcagagtcaactttctcccatttgttagaggtgggagctcagagtaggggtaggggagtccaactgaggccagagctagagaggcagtgcttcagaattcggctcatccccaggtctggaggccagaggggcagctttccagaagctcaggccagaggcaggccccaagctgggcactgttcccaaaaccccatcccagaggccccccggagcctgggctgcagcccatagcctggcccccttccccatcaccactccctcctctctctcccctgtctccaggactctggggggctgtattgctggcagtggaggctggaagggtgggaaggggaggaggacagctgaggctcattcttccctttcacttggggagggggtgctcagatagggcaggatgtggtggggctgtgggctgcagaggcagtgaggctaggggagggagaattataaaacaggaacaaggttcaaggggagaagggaaggcaggactggatgatgcagagtgcacttcatagaggccgggagtactgccctccaggaaggctgagaccccctcatgtccagggaccccgggtctaaggccttgggccgtaaccatggctgggccaaaggcagcagcctccttcagggctcccaggctgcagccatgcccaggaaagggaagaggggttgccactgacttttcgtctcaggctagcaatggccaaagaaaaggctcctggacatcattttgtcctcaccatgttcccaagcaggacagtgatgaatccagaacttgggtgtgaaaaagagatagagacaagatgcggtgaatccctccagcataaatggatagaaacccaccgtcgctgagctgctgaatctggttcctggtgatagaaccatgagcctcgtgaggcaggtcctccagcccagctccctgccctgcacaaacccgtccatcgctgtgcgcagaggcaggggcaggcatggaccccctccttcattgataaaatcacagcaggctgctgaaccttcacccgaccctgcagacggctaaaaaaagctccagcagctgagtcctgctgattgggatctgccggaagagatgcgaggaagagagaggcagagaggtggggggagagggcgggagcacagagggagagtgggagatgagagctgcgcttccttccagggacacagctgctgaggagtcctcgcccccacccccatggcccatcatccattcacggagtttatggcacttgggctcacgttgcctgagctcctgctgggtgctaagaggggacccaggatctagagtctctccaggtcacccaccacccatgatcacagcagtttgccccaaacccaaggcttcatggcctcaaaatgggagcatttgccttcctctcttcttactccaggccctcctcaaccttgacccccaggtggattttccccctaaagctgaggtcttttgtaagccccctggaaaactccaccaagttctaaaggagggtcaagaagaaagacacatgttccctctctcacggagcttccagggggcaaaattaaagctccatggagaggaaatggtgctggagcctgggctaggtacctcacagcaaccatgggaagcaaataggattcatctccatttcacagaagagaaaactgaggctctgagagagagagagagagacagaaagagtttaaccagctcaaggctcatctggccccagagcccagctgatttccagtcccctgtcagcacatgtagagtctctcagacttggcaaaatcagccacttgctacttactagcagaactgtagaatctcaggccccaccttagcctactgattcaggatagacatgttcacaggattaatcaggtgatgcgtattggagttaaaatttgagaagcactgatttaaaaccaaagaatcacctggagactttaggaaaacacagattcctagacccatcacttgagattctggttcagaattctcaggtggggcctgagaatttgcattcctaacaagttcccaggtgatgctatgatactgatgatgcggacctcacgatgaaaccactattcctcccgcctgggcaacatggcagaatcccatctctactaaaaatacaaaaattcgctgggtgtggtggcataaggctgtggtcccagctactcaggaggctgaagtggaaggatcacctgagcctggagaggccgaggctgcagggagccatgattgcaccactgcactccagcctgggcaacagagtgagaccatgtctcaagaaaaaaaaaaaagaaagaaaccactgctctaggctaaatcccagccagagttggagccacccagctaaactggcctgttttccctcatttccttccccgaaggtatgcctgtgtcaagatgaggtcacggacgattacatcggagacaacaccacagtggactacactttgttcgagtctttgtgctccaagaaggacgtgcggaactttaaagcctggttcctccctatcatgtactccatcatttgtttcgtgggcctactgggcaatgggctggtcgtgttgacctatatctatttcaagaggctcaagaccatgaccgatacctacctgctcaacctggcggtggcagacatcctcttcctcctgacccttcccttctgggcctacagcgcggccaagtcctgggtcttcggtgtccacttttgcaagctcatctttgccatctacaagatgagcttcttcagtggcatgctcctacttctttgcatcagcattgaccgctacgtggccatcgtccaggctgtctcagctcaccgccaccgtgcccgcgtccttctcatcagcaagctgtcctgtgtgggcatctggatactagccacagtgctctccatcccagagctcctgtacagtgacctccagaggagcagcagtgagcaagcgatgcgatgctctctcatcacagagcatgtggaggcctttatcaccatccaggtggcccagatggtgatcggctttctggtccccctgctggccatgagcttctgttaccttgtcatcatccgcaccctgctccaggcacgcaactttgagcgcaacaaggccatcaaggtgatcatcgctgtggtcgtggtcttcatagtcttccagctgccctacaatggggtggtcctggcccagacggtggccaacttcaacatcaccagtagcacctgtgagctcagtaagcaactcaacatcgcctacgacgtcacctacagcctggcctgcgtccgctgctgcgtcaaccctttcttgtacgccttcatcggcgtcaagttccgcaacgatctcttcaagctcttcaaggacctgggctgcctcagccaggagcagctccggcagtggtcttcctgtcggcacatccggcgctcctccatgagtgtggaggccgagaccaccaccaccttctccccataggcgactcttctgcctggactagagggacctctcccagggtccctggggtggggatagggagcagatgcaatgactcaggacatccccccgccaaaagctgctcagggaaaagcagctctcccctcagagtgcaagcccctgctccagaagatagcttcaccccaatcccagctacctcaaccaatgccaaaaaaagacagggctgataagctaacaccagacagacaacactgggaaacagaggctattgtcccctaaaccaaaaactgaaagtgaaagtccagaaactgttcccacctgctggagtgaaggggccaaggagggtgagtgcaaggggcgtgggagtggcctgaagagtcctctgaatgaaccttctggcctcccacagactcaaatgctcagaccagctcttccgaaaaccaggccttatctccaagaccagagatagtggggagacttcttggcttggtgaggaaaagcggacatcagctggtcaaacaaactctctgaacccctccctccatcgttttcttcactgtcctccaagccagcgggaatggcagctgccacgccgccctaaaagcacactcatcccctcacttgccgcgtcgccctcccaggctctcaacaggggagagtgtggtgtttcctgcaggccaggccagctgcctccgcgtgatcaaagccacactctgggctccagagtggggatgacatgcactcagctcttggctccactgggatgggaggagaggacaagggaaatgtcaggggcggggagggtgacagtggccgcccaaggcccacgagcttgttctttgttctttgtcacagggactgaaaacctctcctcatgttctgctttcgattcgttaagagagcaacattttacccacacacagataaagttttcccttgaggaaacaacagctttaaaagaaaaagaaaaaaaaagtctttggtaaatggcaaatgagcgtgtctttgttttgcaatcccccacaccccacctgaccgtcccctctcccctcctccctgccctctcccaggcctcgtttcttagagacgctcagaaccacaaagttgctcaggaatgctctgagcccgtctggtgacacaggaccaagaggctgaaaggtagaaggaagatgaggacaggaggtccatcttgcaaatacccttccagagttcaagggataggccccaagcctgcacagtcagcactgaaccggacatgctgatcctactgcagctttgggaaggccaacttttccgggtaacctcgatacctggggactctgcatttagcagctcttgcacagtagcctgctcacctgtcccagctcagaccagaactagagcccttaaccttttgtcagccccttagactctgaaagctggggtttggagggagggcctttctgtgggcttggagaccacagcatactggactaggggtcagggatgagaccctttgctggcatgagagctggaaccacccatgatcctctctgctagccactgtagcagcagtggcctccgtggtgtatgtcatagtcccttcctgctggtacaacaaaatgccaccgatggagtaatttacaaaccatagaaatgtatttctcacagttttagaggattggaagtccaagatcaagacgccaacagattcagtgtctggtgtggactctctctgcttccgagatggggccttgccatgccctctggaggggacaaacactgtgtcctcatgtggtagaagagtggaagatcacaatgagcctaactagttccctcctgctcttttattgctataagggcattaatcccgttcacaagggtggagccttcatgacctaatcaactcccaaaggccccccccaacttctcataccattgccttggggtttatgttccaaccatatgaatgtcggaaagatacatacattcaaaccatagtgtggatactgactgtggaggagcagggagagagggacagacaaaggcccccacacaggccaggtgtccgtgtcatttcgtgccttggtgccacccagagccgtgacttctgcaagccagagagcaggtcagtccaacctacaatgcgtcaagaggggtctgaaggacccagagctgcaatagctctgggccgtggggagctagagggagggctgaggcactcacgcaataggtgattccatccatttccccaagtggaaagagcctcgttgaaaatggagctgcctggtaatgacacccattcgctcatctcgcaagcacgtgacattaccctcctccgagagatgcactgggctggaaggtttttaacaagatttgtcagctggtctccaagccgggaattggcgccctgagaggaatgagcctggcacggatgcagtcagcgtggagcggcgtttgcagcaatggcattaaatattaaaaggcacagctgcgactgtgtgcgtgagcgtgtggccagggggcaatgccagtgtgcgtgtgtgtccccgaggggaacctgccggagcgcatgtgcgtgtggagcccgctggtgtggacatcctaatgaggttacagatgggaaaacaaccctcggttcctgaaggggaagaatgtaacagagcagtcatgcaaaaggcagccaggccagccgcacaaatgcgccccctcagctgcagatacatttttctagaataactggacatctccaaatatttacagagaaaacaaaacccccagcaatgtcaattccctcgaactgctgtgtctcagaagttctgacctcggttcagtgctggcctgatccctgctcccttgcccgaggctctcatgtgcccatcttgagcttggggtgacccctgggaagaaggaaaaggccccctgggaggcccacccagggcttctctcttcttttcttacctgcttcatacatctgaaccctcttcccaggttcacagccaataagccttctccagtcacctgaaatttccttttcatttcatccccaggccctcatctccctcatccttgctggctgcaaccccaagccaagcccaaggtattcccaggccacaggtcttccctttcagctagaagcaccacacctttctcatcacagactcacagagctccaagggacctcaaagatcagctgggccaatcccccagtcattttctagatggtgaaactgaggcccagcggggagaagctgacttgcctgaagaggcgtggcaatgcagggatattggttaaacttgctttggaagcctgagcgtctggcagggttgcaggagggtgtgggggagagcagagactctggagctctgccgactttgaatctcatctctactgcttcccagctatgtgaccttcagctgttgcccaactggtctgagtcttgggtttctcaactgcaaaatggagaggatttgtgtaaacagttagcacagtgcctggaatgttgagtgtggtggtgaggaagagggactttgcagccagactgcctggtttgaaccccggctccactgcctgggctggttacttagcctccctgtacctcagtttcttaatctgtataatggggatactaatggtacctatgtcctaggattgttgtggaaggcaacgaatccatatatgtaaaatgcttagaaaaacttacatatgtgttgttggtaatctttaggagatgtttaagaaacggtaacttaaaaaaaaaagttgctaaccacaaggaaaccaaattcaattccttagcccatttccatccccacagaatttataattcaagctggaaggcaatttagagatgagtgaatctggcctttccatccattgcatggtgagtcaactcgtgctctgagagggaagcaactagcctgaggtctcttgggaggtctttgcaatgctggaactttaacctagttccctgggctcctaaccagagctcttcccaccagaccctgctgggctcacgggaacatccctgcacatccaccgtggcacccgccctcatcccacgctgtctcgttctctccggcaggcaccgttcatcttgtcctttgattaggtccttaaggagaacctcccttctcccctttaaatagttcctgtccttatcactgagtctggagaatgaatgaaatataaaagaaatatggcagcggtcccaaaggaaatcaggcaactgatctttttaagaaaggaagatgggccgtcttctctgggaatggttctcagttacatgtctttgttgagggtgaacagttggaggaaaagaaacagacctaaagggattgtggggggaattaaggcaaaggagatgggggaaaggcagggggaagatggggcaggaatgggttttagggaatatacactgggggcgggacttgaagcaaatcttcagtgggtagttagatgtcccatcctgcatgcacacacatgcatgtgcacacacacacacacacacacacacacacacacacacacacatagagcctccccaggtctcccaatctcaggtgaggagaagggggctctattagtcttagagacaggtgggcccatggccttctttgcagagaagatggttagaatcggtcatgtgtctctggtctgagaccctagagaaactccaaggagaataaaaaaggttgggggggggcctctccctcaactcaaaagagcaaccctatcaggcttcagaaaagcaagccctcctagcactccaacccacgggagcagctgtctgagaagtcccaactcctccagcagccaccccctctgttccttcacttctcttgggcccaggcagagacacagacaggagtctgtgtgcagaaaaagctccccaggcccttttctgtggagagctgctccagactaagcgaatctcagctgatctcgtgcgaaatcagaaacgccaggatgtgtattccccacgggctcctctctttgtgtctgtgcatgacccaattcagactcctctgccgctgtcagattctctcctgcccatattcactttgaggatggatataaccttatttttgtgtgttgttcactaaccccagggacttcgctagctgggctgtcctacgtggtacagtaaccaccacatagtgtggcctccaggttctcatctctgggtaaataaacatctccgcacaggcttggccagctctggactggctcagttcctgcatgatgcaataggtctccaggtcacatatccgtgcccactagcaagagggaaggtaaggagatggttcttgccctgaagtcctcttgttcctgtgtcagagtttatttaggacagaatagtttatatttgctccaagtaaataatatctgacattgggaagcacagcagatgcagcagatgagatgcccccaaaccatttcccaatgtttaaaaagaggcctggaaaggacaagctcattgatctcatttggtttatgaaactgcactcaagtgactgaagcagaaacctgaccacgtgtaaagactgaatggctcaatctgcttcccaggcccagagggtgttttctgtggcctggcccaggcctatggtgaagccggtgctagggggtcacctatgtgggagccagctctgcctcctgccccgaagctccagagacttctcctacaactgactctctggacacgccctcttgcttgcactagtatctcttacctgccacctgccctcctccacacaccccgatttcagggaagctcagctgctgagagtgctattgacaacctctggacttggaaatcaggaggaagggaatgggaagaatggtggcagctttgtgcctgggctgttcaggaagacatccctctgcctttgttctccagggcaagacacagggctagacacgccggaatccttaaatcctttgtcaaaagcagaactgggattttcgtccaaggactacacctgtcctgtcctcagcctccttctcagttgcccccctcccacccatgctcatcagagccgaaccctgaggaaaccatggaccgaaagaccttgtgagcttttgttgctgggagtgtcagaggctgggagacagaaggtatgagagatgagatgccatggaagggatggcagcgatcacagaggctggggggcagaggaaagagacgttgaagaggtggaggggtaatgaacctaggcgggagacaggctaacatttactaagtgcccgtgatgcaccaaggactaggctagctatacaacctttcattgaattcttatgacaacagagaaggaaacaggtttagagagctcatgtaacttacctgtggtgacacagctagcaactttattaagattttgttacgtactatacactgtattaagcatcagtatcttatctcatttaatccccacaacaactctactagagtctcatttaataaatgaggaaacttaggctcagagaggttaagtaactttatcaatgtcacacagctactaagtgatttcaaccagttctagctgcctccaaatttcttgctttagtcaccctacttcaccgttcaactaaacagctgtttaataccaaatatttctggagcccctactgagtgccaggcactgtgctgtgtccagccaacatctttcaaaccctgccagacacagagctctgacctgggagaagggagaatcaaataacaaagacacagcccccacctgccaggggctgtgacccccacagctgggcaataaccaggtctttgctgctccacagtaccttgtccctgcttctcccctctaggccctgcttcttacctaggcttcctccatgggctagccctgcagatgactgagagggctgagatggctttgccacagactagtcactgggcaatatgggcaggtcacctcccttttctgggcctccagctccccagctgtacaatgaggttgctggaccaaatcatttctacccatcgcctccagctctgacttgctatgggtgccttgtctgggcagagtctgggaggccagtgctcagcggggtagggctctgggcatgttgatgcttgcacgaggtgcagggcaagtgtgtgaggggctgaggaagctgctccacccccagctgtggtttctggtggggccaccatggcagcaggtggagggaagtgtttgtcacccttccaacaaaggcagtcaaacaaaagcctcccagggcaccatgggaataggcggcaagggcgccaaaaataaaacacacttctcctttgataggcatcggtggcaggcataggcagctgctaagggagtctgtccttggggtggtgaggaaagggttcagatttcgtgcccaagaacactcacactcacaagagctgtcccacctcacaaacagcccacacatacagatgctcaatattcacacaagaaacaccaccgcacacatcacacacacacacaccaacacagcagtcacacaatcagcatacacatatacacatacaaatagaaaacttgcccccatacaagaccagcttcatgggccgcgacctgcacagtcactctgggccctgcactaaggccctgcactaaggcccatgctgggtataatgctttgctgcctgcactttgaaattcttaattatttttaaacaaggggcgcagcatttacattttgcaatgggccctacaggttctgcagttgctcctgtgggtgtgcactcatgagagcgttcactacctgcttaagcataccttttaacacttttacactgttgatgggagtgcaaattagttcaaccattgtggaagacagtgtggtgattcctcaaggatctagaaccagaaataccatttaacccagcaatctcattactgggtatatacccaaaggattacaagtcattctactataaagacatatccacacgtatatttattgcagcactatttacaatagtaaagacttggaacgaacccaaatgcccatcaatgatagactggataaagaaaatgtggcacatatacaccatggaatactatgcagccacaaaaaggaatgagatcgtgtcctttacaaggacatggatgaagctggaaaccatcattctcagcaaaataacacaggaacagaaaaccaaacaccacatgttctcactcataagtgggagttgaacaatgagaacacatggacacagggaggggaacatcacacactggggcctgtcagcgggtagtagggggcaagggaagggagagcattaggacaaatacctaatgcacgagggacttaaaacttagatgataggttgataggtacagcaaaccaccatgacacatgtatacctatgttacaaacctgcacattccgcacatgtatcctggaccttaaagtaaaattaaaaaaaaaaaaatcctacctatatagacaagagtgcatccgctacacacatacacacagatgcacaaacacatgcatgccacaaatgcaacacccacacaaacagcaatagccccccatgttcacgcgccaaagcacacacattgatacccagaaggggtccagacgctcacaagcaacgctacaacatgcagcctatgccctgcagcctgctgacacaattcaattgacttaacattgggggcagcagaacaatgtgaagggaaggggcttggagagaaaacaggttcatgtcctccacctgcaaacatctcccacctctctcttcggccctgggctcacccaccccactcagcggctgggaccagaagaaagggagagccagggaggtgggcgcatggacggaaaggggacagggatggaggtggagagggagagagagagggcaagaaagaacgggtggggagtgggggcaggaactgagtccccaggtgagctggccccagcagtggtctcataagagctcagaaggtcttggacccaaagcagtaagaacaatgcccctgtgctccccgcaagcacagggcggtcccgccctcagagtcagtcagaggatgcccacctcccttcttactagctacacagccttgggcacgccgtgtaactccgggcctcagcttcctcctttgtggaatgggatagccaattctacattgcagggtggcaaggcacacacagacacaacacctcctggattcctgcagcaatcaacagctcgtctcgtgatcaggcctgcaatctgattcttggcacaggaactccagaccccctcattacagcagacatttggaacgcgtttatttcccatcttctcctggtctcacttcacacctcacagccaggtacaagcacagaggtggatgtaattcatggcctcatggccaccatcacttcagggaccttcaggatcctgcagccccatcctgccccaccccctacccaaaccaagcaggactccaaggcctggaaatttttcttcctcctctattcttttttttttttttttttttttttttgagacggagtttcactcttgttgcccaggctgggcaatggcgcgatctcggctcaccacaacctccgcctccagggttcatgccattatcctggctcagcctcctgagtagctgggactacaggcacccaccaccatgcccggctaattttttgtattttaagtagagacagggtttcaccgcgttagccaggatggtctcgatctcctgacctcatgatctgcccgcctcggcctcccaaagtgctgggattacaggtgtgagccaccgcgcctggcctcctcctctattctttacccccaacctgtattctccacccccaaccctaaccttcctgatttatttatttatttatttatttatttatttatttatttagagacagagtcttgctctgtcgctaaggctggagtgcactggctcactgcaacctctgcctcccaggttcaagtgactctcctgcctcagcctcccgagtagctgggattacaggcatgcgccatcacgcccagctaatctttgcttttttttttttcttttttttgacagagtctcgctcagtcgcccaggctggagtgcagtggcacgatctcggctcactgcaagctccgccacccgggttcacgccattctcctgcctcaggcgcccgagtagctgggactacaggcgcccgccaatatgcccagctaattttttgtatttttagtagagacggggtttcactgtgttagccaggctggtctcgaactcctgacctctagtgatccgctcacctcggcctcccaaagtgctgggattacaggcatccctatttaaaattgtcccagcctctgtcccttccctgaaaaccccatcattctgttaggtgataccagattcttaaagagtgattcgggaaaaacgaatgggccctaaggggcatgccagtgtgccccattccaattacagtcacccacaggagagaggaaaggtcgtccaagtggccaccaacaagaaactatttcatcagatttcttttttgtttgtctgtttgagacggagtctcaccccgtcacccaggctggagtgcagtggcgcgatctcggctcactgcaacctctgcctcccggattcaagtgattctcttgcctcagcctcccaagtagctgggactacaggcacgcaccaccacatccagctaatttttgtatttttagtagatacagggtttcaccatgttgcccaggctgctgtcaaactcctgacctcatgatccgcccacctcagcctcccaaggtgctgagattacaggcgtgagccactgcgcccggcctatttcttcagatttcttataggacataagtcactcagatcccctcacaggctttctgtcaacttactgagagggaaactgagtcaaggaagagtgaagtgacttgggtgagcagcagagttgagggttgtggtctttctgatgtgcagtctccatgagaccagatc

SEQ ID NO: 23 - DNA, 2139 bp, Homo sapiens
gtgagacaggggtagtgcgaggccgggcacagccttcctgtgtggttttaccgcccagagagcgtcatggacctggggaaaccaatgaaaagcgtgctggtggtggctctccttgtcattttccaggtatgcctgtgtcaagatgaggtcacggacgattacatcggagacaacaccacagtggactacactttgttcgagtctttgtgctccaagaaggacgtgcggaactttaaagcctggttcctccctatcatgtactccatcatttgtttcgtgggcctactgggcaatgggctggtcgtgttgacctatatctatttcaagaggctcaagaccatgaccgatacctacctgctcaacctggcggtggcagacatcctcttcctcctgacccttcccttctgggcctacagcgcggccaagtcctgggtcttcggtgtccacttttgcaagctcatctttgccatctacaagatgagcttcttcagtggcatgctcctacttctttgcatcagcattgaccgctacgtggccatcgtccaggctgtctcagctcaccgccaccgtgcccgcgtccttctcatcagcaagctgtcctgtgtgggcatctggatactagccacagtgctctccatcccagagctcctgtacagtgacctccagaggagcagcagtgagcaagcgatgcgatgctctctcatcacagagcatgtggaggcctttatcaccatccaggtggcccagatggtgatcggctttctggtccccctgctggccatgagcttctgttaccttgtcatcatccgcaccctgctccaggcacgcaactttgagcgcaacaaggccatcaaggtgatcatcgctgtggtcgtggtcttcatagtcttccagctgccctacaatggggtggtcctggcccagacggtggccaacttcaacatcaccagtagcacctgtgagctcagtaagcaactcaacatcgcctacgacgtcacctacagcctggcctgcgtccgctgctgcgtcaaccctttcttgtacgccttcatcggcgtcaagttccgcaacgatctcttcaagctcttcaaggacctgggctgcctcagccaggagcagctccggcagtggtcttcctgtcggcacatccggcgctcctccatgagtgtggaggccgagaccaccaccaccttctccccataggcgactcttctgcctggactagagggacctctcccagggtccctggggtggggatagggagcagatgcaatgactcaggacatccccccgccaaaagctgctcagggaaaagcagctctcccctcagagtgcaagccctgctccagaagttagcttcaccccaatcccagctacctcaaccaatgccgaaaaagacagggctgataagctaacaccagacagacaacactgggaaacagaggctattgtcccctaaaccaaaaactgaaagtgaaagtccagaaactgttcccacctgctggagtgaaggggccaaggagggtgagtgcaaggggcgtgggagtggcctgaagagtcctctgaatgaaccttctggcctcccacagactcaaatgctcagaccagctcttccgaaaaccaggccttatctccaagaccagagatagtggggagacttcttggcttggtgaggaaaagcggacatcagctggtcaaacaaactctctgaacccctccctccatcgttttcttcactgtcctccaagccagcgggaatggcagctgccacgccgccctaaaagcacactcatcccctcacttgccgcgtcgccctcccaggctctcaacaggggagagtgtggtgtttcctgcaggccaggccagctgcctccgcgtgatcaaagccacactctgggctccagagtggggatgacatgcactcagctcttggctccactgggatgggaggagaggacaagggaaatgtcaggggcggggagggtgacagtggccgcccaaggccacgagcttgttctttgttctttgtcacagggactgaaaacctctcctcatgttctgctttcgattcgttaagagagcaacattttacccacacacagataaagttttcccttgaggaaacaacagctttaaaag

SEQ ID NO: 24 - DNA, 1137 bp, Homo sapiens
atggacctggggaaaccaatgaaaagcgtgctggtggtggctctccttgtcattttccaggtatgcctgtgtcaagatgaggtcacggacgattacatcggagacaacaccacagtggactacactttgttcgagtctttgtgctccaagaaggacgtgcggaactttaaagcctggttcctccctatcatgtactccatcatttgtttcgtgggcctactgggcaatgggctggtcgtgttgacctatatctatttcaagaggctcaagaccatgaccgatacctacctgctcaacctggcggtggcagacatcctcttcctcctgacccttcccttctgggcctacagcgcggccaagtcctgggtcttcggtgtccacttttgcaagctcatctttgccatctacaagatgagcttcttcagtggcatgctcctacttctttgcatcagcattgaccgctacgtggccatcgtccaggctgtctcagctcaccgccaccgtgcccgcgtccttctcatcagcaagctgtcctgtgtgggcatctggatactagccacagtgctctccatcccagagctcctgtacagtgacctccagaggagcagcagtgagcaagcgatgcgatgctctctcatcacagagcatgtggaggcctttatcaccatccaggtggcccagatggtgatcggctttctggtccccctgctggccatgagcttctgttaccttgtcatcatccgcaccctgctccaggcacgcaactttgagcgcaacaaggccatcaaggtgatcatcgctgtggtcgtggtcttcatagtcttccagctgccctacaatggggtggtcctggcccagacggtggccaacttcaacatcaccagtagcacctgtgagctcagtaagcaactcaacatcgcctacgacgtcacctacagcctggcctgcgtccgctgctgcgtcaaccctttcttgtacgccttcatcggcgtcaagttccgcaacgatctcttcaagctcttcaaggacctgggctgcctcagccaggagcagctccggcagtggtcttcctgtcggcacatccggcgctcctccatgagtgtggaggccgagaccaccaccaccttctccccatag

SEQ ID NO: 25 - DNA, 28486 bp, Mus musculus
  misc_feature (8132)..(9060): "n" at positions 8132 through 9060 can be any base.
  misc_feature (20544)..(21524): "n" at positions 20544 through 21524 can be any base.
  misc_feature (24896)..(25248): "n" at positions 24896 through 25248 can be any base.
cacgggatccaaaaccctctcctgacttctgcaagcgctgcacacacatggtacatagacatgcacacgcacgtgcgtaaacatgctggctttctgatcctacggcttctaatttagcactaacacttagactttttattccctgttgctgccatgactgaccccagaccctgcctttcaggcttctccttgcttttcagacatgggacagttctggggtctcttttgcaaattgagacctgtgctcacctagcacacatgtggccttgggttccatccccagaactgagtgaatgaggcatggtggctcaccctgtgattccaatattcagaatgtggagacagtagaatgaagagttccagtttcaggtacaccaaaccttgtaccagaaagaagagggggaagagaaggaagaggagggagaaatctagcaaaagatggaggaagcatacagtgactttgaagatgtgttaactttcccttgctgtaaggaaatacctgcggtaattaacttataaagaacagaggttatgtgaactcacagtttggggattttagtccagaacaggactctattctacttcgagtctctaatgcagatgatgagagcgaaatgctgagcaaacagaactgaactgccctgtactacatggcaaatcagaggaagagtagtcccatcgtcctctctgaggccaccttcagtaacctaaggactgccaggctgtgctgtttgtttgttctctgtctctagggtgtttgttttcgggtttgttttggttttgttggtggtaggttttgttcatttgcttgtttgtttttgatatagaatcatgctatgcagcccaggctgttctcaaacttgtaatcctcctgtcttcgccccctgactactaggatcacagtatgcgccaccacacctggctctagaatccatctcttggaagttctaccacctcccaataaagccaccctgagaatgaagccttggacaaccagagaatattgctgagccaaactacagcaagaaggctgaccagaaggctctgccaaattcacaagccactggcccatctgcaatagatgccatctgtaaaggagtcacttctccccagggtgacagattcaatgcaacctcaatcaaaaccctagctgtggtgggtttgtgtgtgtgtgtgtgtctgtgtgtgtttatgtgtgtgtctctctatgcatatctgtgtgtgtgttgggggtgctaacctgtgtctgtgcatgcatgcacagtgtctgagaaagagggtccaagatgccggccactgtaggccatgttactgttcgcatgggacaggccttaaagaagagctgcaaaagagccttgtacccacctcctccaatgagacccaccccagtctgctttctcagttaatctcttcctctctcaacttgaagcctgtctgggaatttgctgttgagtagattataggcttggcctcagctggtccactaaaagcaggaggtgagggcccaggcctgaggaagcattggggaggcagatcccaggcctaagtttgttggagacacattctccaggaccacaaatagctgacatgctgttaccagattgtcatcccagtacctgcaaagtgggagaaccagaatcaggtgttcaaggccagcctctcaaaaaacaaaactgaagtaagtacatcaactctactctgccttttaagagttaaaaaggggcctggagagatgactcagcagttaagagcactggctgttcatccagaagaacctaggctcaattcccagcacccatatggcagctcacaactgtccatgacttcagttccataattccaggggatttgtcatgttcacacaaacatacatgcaggcaaaacagcaatgcacataaaaaaaaataaatcataaaacaaacaacaaagagttaaaaggacaggagaagaggaacaagagaaggttcatgtggccaggttttcttttccccaatttaaaagtttcttctgaggtttacatctcacacccataaagagctcagaagtcaacaaagcgaggaggcttgattcatcatgaagtcatttcaaaatttctctttctgaatataaaccaaaatatttaattaattccacataccacaggaagtacattacagccttcaaattcactctgcttaacagtaaactcgtgaacgaatgcacagaacagaccccagtcacccaccagcactatgctaaatgtcctatgcacattacctgaattacttctggccatggcctggcagaggaaatcatcccactgcccagcagagatgagggcatctttgcccacagcctctccaatgccagagagcacagctctgtacgttgcctcctgtagttacagaaatgttttccaacttcctggcatcctgaaaagaagtggcttgccttaaagtgacttttctttttccttttcacaaacagtgcaggatggcctcctgtgccaatgacaggtatgtgctacctcatctagttctggtagtacgtggattttctctctctctctctctctctctctctctctctctctgtgtgtgtgtgtgtgagagagagagagagagagagagagagagaaagagagagagtgagagagagagtgtttgtgtacctgttctttcttgtgtatgtgtgtacctgctctttcttgtgtgcacatatgtgcacctgttctttcctctgtgtgtatgtatcagctctttcttgggggggggtgtatgtccccctgcttctgccttacaagggctagtatctcaagcaatgagttggtggagttacagatgcctgtgtccagctctctatggattgttaagctgctaacctcagcacactggttttctgccctgtcaaatgcctgcgatgacagcatccacctggtaagctggaaggtggggtctgctcctccatcccacctgagagggaatgatttccttagataggctgcggctggaactcacctgatctagaagtacactgggggcacacaggagccatggagcccctaaggcccaccagcagcttctgtcctatcccttctggcaaaggggccatctgtcaaaggaggggttgaaagatggcccagaagaggtctcctcaaatctctgacccttacaggactctgatgataaatgatacagtctcagtaggcctatcctggcttcatttcttctgctgtgataaaatgtcattgggggaaaaaaaaaaaagcagcttagggagaaagggcttattctggctcggaactccaggtttccagtccattactacatgaaaggcagtgtggcaggaacttgaagcacatggtcacatcatatcctcccagagcagtgagatatgaatccaggggtggggactggaatgatggctcaggggttaagagcatcggctactcttccagaggatgccgattaaaactgtctgtaactccagttccaggggatctgacaccctcacgcagacatacttcaaatagacatacatgtgggcaaacaccaatgtacttaaaataaaaataaataaattataataaataaataggtgcttagttacttttcccacctttaatcagtccaagacccaagcctagggaatgtgtcacccactcccacactgggtcctctcacatcagctaagatagccaagacactacccacagccgtacccatagggcttcttgagactctctagcaacgtgaatcgaggttgtgtcaagttgacaattgaaactattatggtgcttaactgctccctgatgaacaggatgtggcagagacaggcatcccattggttaatgtcagaagtgtcatccctccgtggactgaatttttgcctttaacttatatttatttgcttgtttgtttattagtgtttgtatctatgtgcatgtgtgagtgcggcttccctcagagtccagaagaatgtgtagaatccctctagagctggagtagggggctgccgggtatgggtgctggaaatcaaacccggtcctctggaaaaatcagcaagcactctgacctgttaaatcatctacctaacctcatccttgctcatgttttaaaaatagttatagtggccaggtggtggtggcgctcgcctttaatcccagcacttgggaggcattggcaggaggatttctgagttcgaggtcagccaaagtgagttccaagacagccagcagggctatacagagaaaccctgtctcaaagaaccaaaaataaatgaaataattatagtgggtttttggacattctctgtatgctaagcaccttccagatgggcttcctgacaagagatccgtggcctgacccacactgatttgaaataatgatgaaaattcaactttcagaagcaaaggctgtagttcctctctggcttctaccacagtcagtaaccagtccagttccttagagagtcagtcaccttagtacacattccagcggagccaagacagtatagtgctccttataaacatggaagggcagttcctacccagcgagtcactgcgggcttggtgcctctactgaagcgcaggctcaaccaccgttcaccgcggggagcgtcctcaggctctcgcgagccactgctgcgcgtcgcgtccaaggtttacggtaagcgcggcgctcaggacgaccacgtggcggcgaaacaccggccggcgggaatgcgcggaatgcgcggtgcggcctcgcgcgctccccaagccgtgaccccggagttcccggcgcgcgtttgtgggaccgcggaggctagtgccatgggtccgcccgcgcgtccaagccaccaagcaccacagggagcaggggccccatggagggctcagcacgtgaggctagacaaccttttccaaaacctggggctaggtttgccctccctgtttgggctccatcacagatctggaacccgcttagtccccattctaaagcccccactgatctggattaagaatggagatgcctggttttgcagggaagcaggtcaaagggctctgcgccctgaccgcccttcggagtgctgagggaccagtgccaggggctgaaagaccccagttccagcagctgcgccctgggatcgcatgagggttcgctcaccacgattgagccacgtggtcctgcctggccactggtggctcaccttggcccgagtgcccgctccccaccatttagtctgggaagggccgagggccaaagcccaaaaggaccctagggttcttcagagcacctgtgattcgttcagagagctggagaccgagcagacatccctccttcaaattgcatctctacccttgggggtccctggagccaggcttgccgctccagagctcattgcacggcgcgcgtctattcgctctgggtggtgggatttagggactgaaacttatttggtaaggcacgcttgggaagataggatgcgacggtcccaggtgtgcacaggggatgagctgagcatacacaccttagccgaagggtgcctgaaatccgctcagggtaacctaggcggagcagccgtgtagcacgtgggctgccacgcgcgccccaaaacgccttctgggtgaggagagggaagccgtaatgcctccggaaccttggggtccatattcggaagtgttttctctgggcgacttgaaggctaaattaacaatggctagctggagcagaaacagccaagtcctttcaagttgccgccaggtatgcggctgcaggtgaccccacctaggtgcgtccgctcttctccaggaggggctacagccagaggctcagtattgccgcccagccccgcacccctaacccgagccccgcgcttagtcgcgagggttcctcaatgaacgcgctccctcccacttctcaatgaagttcccacagccagggatagtggcaaacgcaagactaaatctccgctctctttggaaccttggctccagtcaggtgggggtaggggtagggttcgaggaggcaggaaatccgaaaggggattaaagttactttgagattttctttccaaataacgtggttccctctcggctgggcaagtggccttttgtctccaaaaggtcactgacaaataagcgcagaacactttaagcccagagcggacagttcctgccacgagattttttttaaagccaatgtaaagttaaaattgcaaaagaaagtgggtgtttgtgtttaagttactatttcgctggaaaataaaaatccaagttctttctctgagattcctaaagcagttgtcccggaaagaactctgaattgcagcccacctcctgggctcgggattcggacaagcagggtttccaggatggaggatgggcgctccccgccgggtcccaaattcctgcgcctcccctacgggttcctggacggctctacacgcccgccaaccggacttgcacttttgctcctctccctgagcgcagagctcaacgaagttcctcgtggagatctgcccggtccgcctagtaacagcactgagtccggattggctcatgcaaatttcagtttcctggtctttcccgcggtggcggtggtggggggtggctgcgggtcgctagctcgtgctgcagggtgggcgagcccctttatgccccgctgcccttggtggcgcaccctggctaggctagcctgctcagttcgcaggcactcagccgcgggtgatagcgcgcagccctataaatcatgcttactgccgcccggtagggattttatgaatgaaaaggcagcctggccgccctcgtgcttaggctaaggctcccaggcttggcggggcctgtggccagagcaagcgtgggcactctgcccgggccacccaccaccttcggagctacagtggaatcactgtcccgaagggtccggactttagggaccccaatgtcgggggagggggagcggaaggcatgagctcggaaggtgaggggtttgcgtcttgtgtgccgcctggacgccgtgcgctcctttaccagtttcttctgggacacgaaagtattccgtgggaaatgtgtgtgaatagttcgcctagcttgaagtcgggtattgtgaaaacgtttccaaaactagggaactaaataatggacgaaggtggtggaaccgctttattctaaaaatattttatttgaatctataaattataaacttaggagtccattcagttaaccacgaccatctatagattctctttaaatatcaccttatcggctcacaagtttatcttgattctcaccagccgccccccccccccaactcaagactgcaattctaaaggtggagaaacaccaccaccctcaacgaagccaatcaagaagcttccggtggtctggttcctggaagggcgactaataacttgcagcgatttacttttcttaattaaaaaataaattaggaaggagcctatcgtgtctcaaccttttcttcaacggtttatttttcttgggcaaaccgcctgcagtggaggagggggatactgggggaccctggccaggataaaccggtcactgtatgaagacaaatctcagatcccaccccaccccccagcgaggaggaatagatgaaataatggccaccatcttgagctgttgctggaattttcggggttttattttatttttgagcgagcgcatgctaggctggggatcctttaaagttcagatacccctctggccctttgcaaccaccccagtgcgccaggatggagcctgcacgagagcttagggctcgtctggcatcttcgggtgttacacagttcctgaattttacacgtgttgatgaaattgaaagaagacagggacgctgggatttctaagcaatgggtccgcctgtgggtgcctcgtggcgtcctcggaaacgcacccattctcccggtttaagaacagggtgtccttgcacccccaggctccccttccatacattcttccttggcttgcgtgtggcctggcctccctcctagctgtcctcctgtccagagccgccactaccccacctccacaggtctcggaggaccctcttagggaaagaagcccccctcccccttgccccgctctttcccagtttggagagaagcagtccgagcgatttgcatatctacgaaggctgagggggaagggnnnnnnnnnnnnnnnnnnnnnnnnnnnnnnnnnnnnnnnnnnnnnnnnnnnnnnnnnnnnnnnnnnnnnnnnnnnnnnnnnnnnnnnnnnnnnnnnnnnnnnnnnnnnnnnnnnnnnnnnnnnnnnnnnnnnnnnnnnnnnnnnnnnnnnnnnnnnnnnnnnnnnnnnnnnnnnnnnnnnnnnnnnnnnnnnnnnnnnnnnnnnnnnnnnnnnnnnnnnnnnnnnnnnnnnnnnnnnnnnnnnnnnnnnnnnnnnnnnnnnnnnnnnnnnnnnnnnnnnnnnnnnnnnnnnnnnnnnnnnnnnnnnnnnnnnnnnnnnnnnnnnnnnnnnnnnnnnnnnnnnnnnnnnnnnnnnnnnnnnnnnnnnnnnnnnnnnnnnnnnnnnnnnnnnnnnnnnnnnnnnnnnnnnnnnnnnnnnnnnnnnnnnnnnnnnnnnnnnnnnnnnnnnnnnnnnnnnnnnnnnnnnnnnnnnnnnnnnnnnnnnnnnnnnnnnnnnnnnnnnnnnnnnnnnnnnnnnnnnnnnnnnnnnnnnnnnnnnnnnnnnnnnnnnnnnnnnnnnnnnnnnnnnnnnnnnnnnnnnnnnnnnnnnnnnnnnnnnnnnnnnnnnnnnnnnnnnnnnnnnnnnnnnnnnnnnnnnnnnnnnnnnnnnnnnnnnnnnnnnnnnnnnnnnnnnnnnnnnnnnnnnnnnnnnnnnnnnnnnnnnnnnnnnnnnnnnnnnnnnnnnnnnnnnnnnnnnnnnnnnnnnnnnnnnnnnnnnnnnnnnnnnnnnnnnnnnnnnnnnnnnnnnnnnnnnnnnnnnnnnnnnnnnnnnnnnnnnnnnnnnnnnnnnnnnnnnnnnnnnnnnnnnnnnnnnnnnnnnnnnnnnnnnnnnnnnnnnnnnnnnnnnnnnnnnnnnnnnnnnnnnnnnnnnnnnnnnnnnnnnnnnnnnnnctttattgcaaagcaaaaagtgtttattaataattgggggcagggcagggagcggcagtaggggcgctgggacaggcacgaggggcctcgtggcggccgggaatcactaaataagacagtgtgaggaatatttggggtgggggattctttgttcaaacagcggacctgggtaccccgcacacgctgcctggcccagagaaaacgccaggctgcaaggtcgcgtggccccctagtcaatgagactgactgttgtgcgtgcggttctggatttggaggaacctgtctaggtcaaactgggggcggagggggacaaaagcacattttcagatgttcagcaggagactcaggggtcccaaaatattttaaaataatttttaaagtgaggcataatgcccttgtagaggcaaacagcgcccgcaccctgcaaaaggggggccccccggagtttgagttgctggagctcaccccccaatgtccactgagctcctgaccctcggcttggatcaagggtcgtccgatggttattttcaggtcgtttttaggcacctagttattttttaaatatttttaaatattttttgaaaagatgacgtctgggaaatgcagcgcggcggcctgggacgccaccattgtgtctcgcgtgcgctcgagcggcgcccagcccccggcgccccgccagccccgcggtggggttctctggcttgtggcttcctaatttcaacaggggaccggggtctccgtggccaccattgcttctaccggccccgccagctgcccaaagactttccctttcagtttcagggtgggtgggcactgggaaccctcggagcaggagcgcatcccagggagttggccaccggaatccctctctgtgcaatctaggaaaagggaatggggtcgtatcgagcgacgcccccctcccacgttgacggtcagggtccggatccccgcaggtctgtgaggagcagaagtgcgaagaggaggtcttcccgctggccatgaactacctggaccgcttcctgtccctggagcccctgaagaagagccgcctgcagctgctgggggccacctgcatgttcgtggcctctaagatgaaggagaccattcccttgactgccgagaagttgtgcatctacactgacaactctatccggcccgaggagctgctggtaaccacgtaacccaccaccgacaatccctctttatgctgggtggtgggagctgcaaatggcaggagatccagccatccatggacagatctcctgccccacgaaaggcacccgcaccgcaccgcacgacaccgaaatggcagtgagcagaatgccaacccattctacctctgtgcccgccctctttccgtactggactccccaccatgtctgtggtgaaaccactctgaaatgtgggcggtgtgcgccccctagcgacgtgcaggccacggcgctggcggtgggagattctttttgtccgcagtctgtccccttagtatttctacaggcacattttgttgtttacctgtatggggtcccgggttgacccaactctttagaccttctcgaatcagcctgccttccttttgaccgtgttcctcattctctgcagcaaatggaactgcttctggtgaacaagctcaagtggaacctggccgccatgactccccacgatttcatcgaacacttcctctccaaaatgccagaggcggatgagaacaagcagaccatccgcaagcatgcacagacctttgtggccctctgtgccacaggtaaggctccacccccattcttcccaggaagagcgggctccttgccactccccctggggttaaggcctctttccttgctatctattctgagcccagggtgcagatagtttgttggagagatagatgatactgggtggcacattctcttggctagtatcttggagacctaacagaatgacacagcttccctgtgccaacctttccactgccaggaagtggtacggccacagcatgctttctgaagaggtttttgcctcttttcctaggcttcctgccttgcctctgttcttaaggagctcgagctatagagcacacacacacacaccagcttctcccaggctgagccacctgctaggggttcctacatggatgggacaaatggtccagcctcagccccacgagctacatacagtacagccccagagcaggaacttaagaggccccaccaggggtactgcaggccagtactttttggctgagtcctgcctgggagggttggctggaaacagagaaactagaacctccctatgactcctccaagggaccctctctggccccagaccccaggtagattaggctgacataagtcatggtagacagccatgcaggaacccacacacatagacaaccctgctacttctgagtggtttcagtactacttctgacagctgctcctcacctctaactgagaaccctacccaggaggcttagcaatattgagggggtgtggtgttctcccacctgttgaggacccccttcctctgtggccctgatcagacctcagttgctatagctgtttggcctgtgatgtcagaagggccggtagagtatctccccccacccccaacctccacctcacccccgctgtctcagtgacatcttcttatgtctgacagccccatagccagtgtttctaagctgctggtgtgagaatttggaaattctagcttgccaactacctactgagagtgctgagcccgccccaagggtaccaaacaagggggtggcagatgggagtagcaaggccatcggtaggctggaaggatctaaggggtgggggtggccctgctggcagtcagggaggcagctggctggggttcctctgaggagagcggagcctttggaagctccaggcagccttttatggagctgaaagtgccttcagagaggcagcagagtttcccagagataacttggggatggagaggcacaacctcccccaggatagttctggcagtagtgtgcccctcccgggacccctagatgccagcagagtaatcagtaagcgctatatctgggtacagctggactcagctcttccagctctccttactgcctttgtctgtgcccctggaatacaggtgggggtaaaggacagcttggtgacctgcggtaggccagtgttctgtggtctggagcatttgtttctctgtaggagcaaccagctcctttgtcacacgggaaccactttgggaagaggccagtgtgacatcaccgtgaatggaaagatgctaacatcaaggccaggagatctgtcgtctgtgtgacaggggttccccctataggagatgggaaggcataacttcccttctgcaaaccgccccccccccaacctggattcctgactgcagttgaacaatgtgctagctagggttggggttgttaacacaggtggccagagcgctgtgtggatggatacagacagtgggaaactgaacttaatgaagtatgtaggtgtcagacatgccactaagccagggtacacctatgtcatcagcaaccagtgttagtagctagggatccttataggacataacagatcttgctactgcccgtgggagggagaaaaacaggctctggaaggggctggggactcctggtcctgctggctggagtctcactccctgtaaaagggctgtttgtgatttgaacttgactccatagccaggttttggttcactggactcactagcatgaactgtccttggtgacacctggaggtattgcttgtctgctggatccctttaacagccaaagctgtatgttctctcagggtggtccccagagggccacctcgctacagcaactctctgccttcctgatcccattccttccagcctccttgatcccaggctctgggtgacacacaagatgattgatgggagctgacatctgttcattcttgtgtcctcctctggcctggaagccctgattcgcaggccaagtgaccagctgtccctgtcactatttctttgttggacgtgacagggaagcagttttcagactcatctttggtgggtttatgcggagaggcattccatcggtgtgacatacaactgcaggatgctgagtccagtggacctgagaggtgtggagttggtgaccccagatgaagtcctaaaatgacaccccactacttcccagttgggacatgtacatatgagagtccctaagactccagggcccctcatgagggaccttggcctggagatctgaggtggctattcccagctccctctgagtctattcctactgggttttcctggactggggtcacatgtcttccccaacctgggtcagtaagccgggaaggctaactcccttctgtggagtctagcctggcctctgaggaacctgggcctgtcatctctacagctttctcctgtgtctgagatgtgtctctagtccttggggtgctgccaggctgactctggaagagacagagatccctgcctcccacctcagccgcgcaaatactgggatgcagatgtgaaagcaccacaccttcatagattccatcctcttagggcgacatagccaacccctccttgatgtttgctggaagtgctggggattgaacccggtgtgtatgccaggcagcattttaaagtttgagccaaggccttattgacaggtagcatcaaggctctggcctggacaccgtaatcctccgatgtgctggggtctagagatgcagcactgtgtgcacctagtgccacttaggtgtctccaagggagctagagttgatgtgggcatccattggaagggcttgaagaccagccccgaggctgtgggtgggagctgaatcataggcatgtctctgtccctctcgctgtagatgtgaagttcatttccaacccaccctccatggtagctgctgggagcgtggtggctgcgatgcaaggcctgaacctgggcagccccaacaacttcctctcctgctaccgcacaacgcactttctttccagagtcatcaagtgtgacccggtgagtaagtctcatcaaaggaggctacagctggcaagggcctgggaaccttggtgggcagtgccaaggcactgtgtgactgggctggagctgagaggtgccaaatctgggtccccacgagcctcttcccagagtcatgggtcccaaaggcatagagggctgtggtgtggtgacagtgcccctgcaatgtgtatgggtagtggcatgtgaagcccggtctggcccagccagcataggaccatatctccctcagtgcagacgttggggattgaatccataaaggactctggtatagacctacacattctagaactttctttgtgtgagagaggggtttgcatcaggcagactgtgctacgtctaactgtacctttctgccaaggagtacagctgatcatgcttggggctctggccgtgaatgttttctcaagggcatcacaagttggcatagacaggcaaaagtccagttctggcttgaacttcagttgggggttcaatggaggtcagagccactggcatgtggaaggcttccaggtgtgacagctgttctgccctgcctggcatcagccacagggacaccccgtgccccattcctacatatctcaattgtagaacatgcagcccccttcccctaagtgtctggggctcctgagaactgagaatagggtatgtgggcaggttggagcccacaggcttcagagagggaagggtgtctgtgggtccatactaggctacttgggcctcactttctccatctgtgaaatggggccattgcccttccatcctctagccatggtgttcatcaaacaaagggggaacaatacacaagttttgaatgtgggggcttcccaggtgttccccaggaatcctcctggcttcaggaatatagacagtgccctagcttcagcctgcctaggcagggcttcagttcatgagtcttattcctgggcaaatgctttccagaccctacctgtgctggagctgtcctctctcagaggccacccaaggcaaaaagttatgagagatagacgctccttgtggggaagttcagggtacagcctgggaggaggaacctagagagtagcagtacctttctagtctctggcagctctcaccggatttaggggtggcttggggagtttcctcaagccttgctcttagcaaagcctgcctcgcaggtcaaggccctggccaccggcctctggctaaacaaggaccccctccatctccgcccgcctctccaggactgcctccgtgcctgccaggaacagattgaagcccttctggagtcaagcctgcgccaggcccagcagaacgtcgaccccaaggccactgaggaggagggggaagtggaggaagaggctggtctggcctgcacgcccaccgacgtgcgagatgtggacatctgagggccaccgggcaggcgggagccaccaagtagtggcacccgcaaagaggaaggagccagcccgggtgctcctgacgacgtcccccttggggacatgttgttaccagaagaggaagttttgttctctttgttggttgtttttccttaatctttctcctttctatctgatttaagcaaaagagaaaaaaatatctgaaagctgtcttaaagagagagagagagagagatagaatctgcatcaccctgagagtagggagccagggggtgctacaaaaatagaattctgtaccccagtaatcaactagttttctattaatgtgcttgtctgttctaagagtaggattaacacaggggaagtcttgagaaggagttttgattcttttatatgttttaaaaaaaaaagcttaagaaacattgctttaaaaaggaaggaaaaaaaatacagcaaaccattgttaaagtagaagagtttttaggttgagaaatgtactctgctttgctgaaaagccacagcttaggccctcagcctcactccctggcttgctcagtgcctacagccctgttacctgatacctgtgctttatcccaggggtgggcagacctcttaaccttatagatggtcagtgcgacctctagtggtctcatggcgtgtggcacaacccccctccccagggctcagcttaatgtgccctctccccccaacaacctgcaggttcacagcgccagccacacagcggtagggatgaaatagtgacataatatattctatttttgtaaccttcctattttgtagctctgtttagagagatgctggtttttgcctgaaggccctgcagcctgcccacatcaggttaaacccacagcttttgtgtgtggtttgttttgttgtgttttctttctctatgttccaaaaccattccatttcaaagcacttttggtcagctagctggaggcagtgttgctggtgtgtgttggggggaggggttctaatggaatggatggggatgtccacacacgcattcagatggctgtacaacaggttgtagggctggtagtatgaggtgcttgggaagttttgttgggtcaagaagagagaactctgttctcgcaccaccgggatctgtcctgcaaagttgaagggatcctttggtgccagctggtgtttggaagtaggaaccatgatggcattacctggacaaggagattggggacaactcttaagtctcacacaggaggcttttaaacactaaaatgtctaatttatacttaaggctacagaagagtatttatgggaaaggctgcccatgaccagtgtgactcaaagcaatgtgatctcccttgattcaaacgcacacctctgccctgctggagaaggtttagggccatgtctgagagattggtcttttattgggcaacggggggggggggggggtccttaaaaaaaaaaaccacaaagacagagatttggtctgcttgactttcccaacccaattggccccattggagagccatccaaactgaggaaaattaggggactccaaaagagtttgattctggcacattcttgccgctgcccccaagttaacaacagtaggtaatttgcacacctctggctctgtgcctttctattaggactttttggcaaaaggtggagagcgggaggcttaagaggggatgtgagggaagaggtgaaggtgggaccacatgggacaggccacggctcctctcatggcgctgctaccgatgactcccaggatcccaggcgttcagaaccagattctcattgctttgtatctttcacgttgttttcgctgctattggagggtcagttttgttttgttttgttttgcaatgtcagactgccatgttcaagttttaatttcctcatagagtgtatttacagatgcccttttttgtactttttttttttaattgtgatctattttggcttaatgtgattaccgctgtattccaaaaaaaaaaaaaaaaaaaaaaaaacaggttcctgttcacaatacctcatgtatcatctagccatgcacgagcctggcaggcaggtgggcggtctgcctccagggatcctgggaccctgatggcgatcgtcctgtcatgctgggcccttcatttgatctgggacatagcatcacagcagtcagggcacctggattgttctgttatcgatattgttacttgtagcggcctgttgtgcatgccaccatgctgctggcccggagggatttgctctgagtctccggtgcatcatttaatctgttaggttctagtgttccgtcttgttttgtgttaattacagcattgtgctaatgtaaagactctgcctttgcgaagccagctgcagtgctgtaggcccccaagttccctagcaagctgccaaaccaaaacgggcaccaccagctcagctgaggcatcccagccaggcaggacccttgagggccgctgtgtccatggtgatggggtgaggttttggccaaaaggccaaagactggtggtgggtccacggaatctgccctgtgacatgaaaggctttgagggactctggctggtggccaggttggctttttgtatttctggttgacacaccatggcgcttcccagcacagacatgtgaccagcatggtccaggaaaaaaaaaagacaaaaaatctagaaaataaaattggtaaaatctcagctcactgttgtctgtgttttctgggaacaggagtggggtgatgccacagccatgtggggtggcatctctggccctggcaccaacctgggattcccaaggggaagggtgtatgcaagtgacagccaagagcaaagtgggagcctctggcgtcagggaggccagcgacagccactgatcagaagcggctctgggtccatcactgccagctcaccctcctgcttatttgcagatggaagatcaacagaacccgcgttcactgccccttgtctggcgcaaatgggtgtttgctctgggtgaatcaccgtttcttaggtgctgccaagcgcccagagagccatgcttagtgttagggccaagacccaaggtggcctttcacatagttctgcagacctgagtggcctggcaagactcctgtgatgtcttcggggtggcagttactcatgactagtattgtttccaaaccctgtggggacaggtggcttttagacatcatcttctacaaggtagcttttgggtctcagcttggctgttttggtgcctggtgggcccctgcccttctggaaagtggagggtgtagaggacacctggtctgagtggtgccacccaatgatgaaagcagaaagagatggacggagggaagcccacagtgaccttgccaggcgacctactcaatgagagtatatgggaacaccagagccagaggtggcttatgaagacacagtactcatcttgtaccaaattgtctgatggcaggatccagaaggtattttgtcagcccagctccatataagcatccgagccgggtccacagtcacatggcatccaggagaatgggcatggggccgtcagcattccaggaaatggccaaagggcattgaggtggaagagtgctttcccccttggttcttagaagcactggggagcgagcttatcgtgtccaggtaggctgacatgaggaaatccgctggggtgcagcagccaggcagccagtgcagcagagtggtactaggaatgcagacacaaatagcaaggggctaagcatccactcaaaggctgctgctgctgctgcagctgctgctttccaccactgcctatcaaaggtgctcatggaagggcgcccaactggaatgggcaagcatcaccatcaactgcacagggctcacacatggtgccgtctcttaacggtgcaattggcttgtctcgtcatccagtggtctgtgattcccagctgtggctgatagccaagcctcttttcttggttttagcagtgaaaccccagataccactggccactccaggctccaaccctcaagtttaactggtaacactggaggctagatcctctgctgggtgtagagatactcctgttctaagggtgatggtaaaatagctttttgagggccctcagagataaggactcagggagccagcacacccaactgtctcctctcagaagctcaatggctggttctctctctgcctctaccagctccatggtcccctgccctgtgtcctggccaggctctccttttgcaggcggcctccatcctgctgagccatcctacctctctcagccaagccaagctcttgaacctgcctggcctctctgagcctcagctccctgaactggaaagattgcccctggctccccattctgtgttgccccactgcctggacctgctccagccttcctgtttgtcctacaggactcacagtgaatgtggcccctgtggagcatgtggagcatgacattgcacaggtgactctgtgtagcctctcccctcctgactccacatcctagaaccaagtgtgaggaagttagcctgttgcccatgggtcagctcaactgctgcactttgtcccagaaagcaggccaacttcaccaaccctacagaggatctgggctgctggggcccacaaaatgccagcagtgggagctgaggactccaaggggtgggacacaggcagaagagtaggactgtgtgttctccctgcagtgccccaaagccctggccacaacatcccaggagacagtcaatgcgggttgggctgtgtgtttggtggcaaggctatgcaggccacataaggccagtgctgggagctggcactgccaagtgtgcttgccaagcaaacctgtacttgagctgataaagcagtctgttgagtgtgtggggtggggtgtataggtaacatgaggcgggcatgttgtatacagggccccacgtgggcacagcacagtgctggtgggatgcagtacccctagttctgagctgatctggcctctcttactcagggatgtcatcccaggaatgtatttgatcaaacagttgtgcaagaggacaaagcaagcacaggannnnnnnnnnnnnnnnnnnnnnnnnnnnnnnnnnnnnnnnnnnnnnnnnnnnnnnnnnnnnnnnnnnnnnnnnnnnnnnnnnnnnnnnnnnnnnnnnnnnnnnnnnnnnnnnnnnnnnnnnnnnnnnnnnnnnnnnnnnnnnnnnnnnnnnnnnnnnnnnnnnnnnnnnnnnnnnnnnnnnnnnnnnnnnnnnnnnnnnnnnnnnnnnnnnnnnnnnnnnnnnnnnnnnnnnnnnnnnnnnnnnnnnnnnnnnnnnnnnnnnnnnnnnnnnnnnnnnnnnnnnnnnnnnnnnnnnnnnnnnnnnnnnnnnnnnnnnnnnnnnnnnnnnnnnnnnnnnnnnnnnnnnnnnnnnnnnnnnnnnnnnnnnnnnnnnnnnnnnnnnnnnnnnnnnnnnnnnnnnnnnnnnnnnnnnnnnnnnnnnnnnnnnnnnnnnnnnnnnnnnnnnnnnnnnnnnnnnnnnnnnnnnnnnnnnnnnnnnnnnnnnnnnnnnnnnnnnnnnnnnnnnnnnnnnnnnnnnnnnnnnnnnnnnnnnnnnnnnnnnnnnnnnnnnnnnnnnnnnnnnnnnnnnnnnnnnnnnnnnnnnnnnnnnnnnnnnnnnnnnnnnnnnnnnnnnnnnnnnnnnnnnnnnnnnnnnnnnnnnnnnnnnnnnnnnnnnnnnnnnnnnnnnnnnnnnnnnnnnnnnnnnnnnnnnnnnnnnnnnnnnnnnnnnnnnnnnnnnnnnnnnnnnnnnnnnnnnnnnnnnnnnnnnnnnnnnnnnnnnnnnnnnnnnnnnnnnnnnnnnnnnnnnnnnnnnnnnnnnnnnnnnnnnnnnnnnnnnnnnnnnnnnnnnnnnnnnnnnnnnnnnnnnnnnnnnnnnnnnnnnnnnnnnnnnnnnnnnnnnnnnnnnnnnnnnnnnnnnnnnnnnnnnnnnnnnnnnnnnnnnnnnnnnnnnnnnnnnnnnnnnnnnnnnnnnnnnnnnnnnnnnnnnnnnnnnnnnnnnnnactaagtaactgctagatccttggacttccattcacagctgctactgaaccattgttgggaattggactgtagactgtaagtcatcaataaattcctttactatatagagcctacccataagttctgtgactctagagaaccctgactaatacaacatgcatacacataaaattaaaatgtgccaggcagtggtagcacatgcctttaatcccaacacttgggaggaagaggcaggtggatttctgagtttgaggccagcctggtctacagagtgagttccaggacagccagggctacacagagaaaccctgtctcgaaaaaccaaaaaaataaaaattaaaaaaataagtaggtaaattaaattaaattaaaatgtttaaaaagaagaaatcttggctgaatattctacagttttttaagagtttgtcaaacattttgatgttacaatggccaatgatgacagtagcccctcacataaatacatagtacagagggcaaaagtgtgcacagggccagttcagaaattgctggaaaattctgtcctgaccctaagacaagtttcactgaacaatttttttatgaaaatggtcgggctggagagatggttaagagcactgactactcttccgaaggtcctgagttcaggtcccagcaaccacatggtggctcacaactatccatattgagacctgacgccccctcctggtgtgtctgaagatagctacggtgtacttacatataataaataaataaatcatcaaaaaaaaagaaaatggtcaatttttaaaatcagacattctaatataatacaaaccatagctatactaatttgacacctgttgaggcctgagagcacaacacattaaagacttggcttgccataaggaacccgtcatgcctctgtgagagcagagagctgtgtacaagatggatggacgttgtacttcttacaatgctggtctgggttgagggggtttcattcgggtgctgtgtgttggtgcagatggaatgacctcgtgcagtacagagcacagaaccgagactgcattgaagtcttgggatgcaatataggtgagcgtctagaagcacccttagatctgattatgcatttgatgtacttcatttttagacaggacctcactatgtagctttgggtggcctggctgagtagaccaagctggcctcaaattccagaggatgcatctgcctctgccttctgggtgcttggaatcaaggtatgcgtgccaccaggcccagtaaatttaattttttcaaattaattcttttctcatgtttagaaatcttttcctggtttttgttgttgtttgtttgtttgtttgtgactcctacattgggtttttgtgactcccatacagaattgggatccacagtttttaagaaactgggcactaaattacccctgccttatgcaaagcccacaaggacaatctggagagaccgcttatgtgaacagcaggagctgactctgttcagggagctaaagggtaaaactgtgtatgctggaccactccatttctgggggttcctggcaagccttaatgttactcatctggacctccctctattttcaggctgtcttgggtctttacgttgtagcttctcatggcctcctcctcagggtccactaccacccaccttaaacaatgccagttccagcctttcaagctgaaatcaagtgtaaaaggcccagccatgcttgagcaggccttccctgcacaagttcaaccacaagcaaacttctgagtgaactgggtggctaggacccttccagagcagacttggcagcaggcctctgagcttgagagcaggttccaaaactcttggtttcaagggtccgcacccactggcaacagtaaggaaccttctgggagaatgggcaagcacttcaagtcttcaatcctgcagacacttggtctttaggcactgatgcaacctctccaatagaggactaaaggacccaccatccatgaagcatggggacaggcactccagccctgcaacccaggaatggccagggtcttatggaaagtgcctctgggaagctgaccacagaaaggcaaggagtgacttcccttcttagaatattaacctgaggtcaccctaacttctaggaaatgtgagcaaagccctattcaccccagatggggctccagtgacagaccaaagtatacttctgccacagcccaatttggtgaaccaatgagtttctaagtggttagttggttataggagtgtgggagacaccccagctacagataatgatcttgtgggagttaaaaaaaaagggtccccacttctagtatactcctgaatcccctaagagctctgctgctggggacaaccaggtgaagtagtggctggaatcccagggtcctccctgccttctccctgtctgtcacccccttaccatgtggttatctctgtaactagttgccacagcaacctaccctacatcatcattaagatggtggtagagtgaactgaactacaacacagagccacaggctgctgacctttgagacaggttcctggttgtcagggctctggggtcccatgcctcattttctctgtcagccctgtgacttcagtttcctgagatacacagcaatttctagctctgctcataaagctgggagccactaaggtcagtggggcaatctttctagtcagcacactttggtcatctccaggtggaacctcaaagtgaacatgggagtctccctcccaggaagtctccctgccacctcctcaggtaactgagtgctcccctacctctgggctcccagaaggtggcagccattatcagagagcccacacggggtctgaagcatctgacagcccttcaacactgctccttctctataaatccatgctttcctagacctgctagattcaagacatgccataggctcaaatgagcaagaaactaggctggagcagcaggcacaactctcaccccactatgctttgtcccgcctggaattggccctttactgtgacctcctgcagtctctccaccagcccacgttgctgactacagtctggtacatgtagacttagtggtatggggaagtcagggcttagcaaacagaactgtggccccttcttccagtttcctcatctcactaccaggcagaggaagaaaaggtttggggtaaatagaaaataaggagggagtgagccagagtttctgggtgtttggtctcaacacaactatcctacaaacatcaccatcagcagggctgggggatggagaggtggttaagggtgcttgatgatgctcttgaagaggaccctgcttcagtcctgaccaccatatgacagctcacaagcacatggaactccagttnnnnnnnnnnnnnnnnnnnnnnnnnnnnnnnnnnnnnnnnnnnnnnnnnnnnnnnnnnnnnnnnnnnnnnnnnnnnnnnnnnnnnnnnnnnnnnnnnnnnnnnnnnnnnnnnnnnnnnnnnnnnnnnnnnnnnnnnnnnnnnnnnnnnnnnnnnnnnnnnnnnnnnnnnnnnnnnnnnnnnnnnnnnnnnnnnnnnnnnnnnnnnnnnnnnnnnnnnnnnnnnnnnnnnnnnnnnnnnnnnnnnnnnnnnnnnnnnnnnnnnnnnnnnnnnnnnnnnnnnnnnnnnnnnnnnnnnnnnnnnnnnnnnnnnnnnnnnnnnnnnnnnnnnnnnnnnnnnnnnnnnnnnnnnnnnnaggcaggcgaatttctgagttcaaggccagcctggtctacagattgagttccaggacagccagggctacacagagaaaccctgtctcgaaaaaccaaaaaacaaaacaaaacaaaacaaaactcctcactaacactagctttatacagaacttcaatctgtatttagctccaggctacaattggtcctgcagtcacagttagggattacatagtgtctctgcaggcccaaaaggccttctggatcacagtttagacagactgcaggaccattctgccaggccctctctctgtttagttacttttctgtgttgacaaaaaaaaaaaaaaaaaaaaaaaaaaaaaggcaatttgcgggatgaaggagtttattctgtccagtttataggtggcaatcattatggtgggaggcatgacagaaggagcctgaggcagatgctcatatcgcatccacggccggtgaacactgttgctcagctcactttctcctttcttttcagtccaggaccccacttcatgggacacagcgcattcaaggtgggtcttcccttctcagttaagcctccctgagaagaccctcccaggcacacccagaggtatctacgaggtgattctaaattgtctcaaggtgactatcaagcaggcagcaagctgagcagaaagacttggggaaagccagcccagaaacctctgcctcagacctccagcatgtgacaagtgattgctcataagggatgacatctaagctagagtcacaggaagccagaacagggtgggatgagtgatagaaaacagaccggtagtggggacacatagctcacaggacatggtctgagaaggcaggggattgaccagcagctcagtgattatcaaggacacaggttccactggtacctgactctgccaccttcagcgacagcttggccacagctcccacagttgtctatggcagtccaagtaacaccttcatggtacagcatccaaaagcagagcattcttctgacgacctatgccctcccctttcacagcaggtgtgactcagtggtgggaggaggcggcatgcccacgtggcagaatggtcctgtagtctgtctaaactgtgatccagaaggccttttggggtaaccaaagcattctggggacttgatggggactttgagaaagggtcaagtgggcagaggtcaaggcttgtacaggaacatggaaagttatcaggcaagcggctgtggtgatgctgatgggtgggagatctgacacctgatgtacacaaggtgaggggataggaggtagagatgaagggagaagagaggggaagagacaagagaggaactagcaactgattgatacctgtagtgaatgtgacaggcacagtaggcccatatctgtgaacctacatcttgacatgcaccatcttggcactgaaggactgctgcagctgtcagtagaaatgatcccagacagactactgctttaaaatacactatttattcttttttctgaatataataggaaagtaaaatatggtgataacagcagctcagttctcacaccgaagagtccctgatcctgggcacctgagagagtggtgctgaatacctgagaggtagccgccaggcccaggaggccaggtgcatggtgccccaagcctcagactcaaaacatatttacaaatccttcggacatacagctaggctctattctgactagattataactgaagataacccatttattttaacctgcattctgccagctggctggttacctgtgctcaggtaccatgtgtccatctcctcacatcctccctggtagatctcccacctggctctatcccagaatgctttctctctcccagatgttccgcctatttcctgcctaagccataggccataggctttttgccacaggtgaggcatccatacaacacaaagatattctctctacgaaatgcctgagagcactgtgccactcctgccagctcgtcttatatctgcctgtaaataccatgccagacacacaagctgttgctaaaggaagtacagtgtcaccaggcaagccctacacattcacagtggcggccaccaattagtcctgctttggtttccaatagttcccctaatgccactttttgtttgtttggttttgaattcactttgtagactaggctgacctcaaactgagagatctgcctactatctcttgagcactgggattaaaggcgtgcaccaccagcacccagctccattgccactccttaatgtatagagctcaccccacacctgttaggagcagcatgaaggccctgcttcagcttcctcccttgtctcgtcacccttgtcttctcagctgggcatccagaggcaaaccaagtccagtggagcctgagtcctgtgcagatagcaggaatcaggtcctccagtggtgttggcaatgacagcgcatgttggaggcagaggcaccatgtggtacttcagggcatggacctggggtgggggccagctctgccaccaggcccttagactagatgggtctattttatcacttctaagccataaggtatcctccacctctggggctgccagagggatggagtgaaacaaggaggcccaagcatggccagcagaggctcagcaggcagcaaagatcctgtcacggcttcccatgacccatttcacatcggcctgcctctgtgagtcccaccctcagggtaaccctacccagggccactcactctggccagtgacaagcggtcttttgagtgtgttgcccctgtgcagaaggcagggtggtcaggtaagccacctaggcagagactcagggaagaggccaagctggtcctcccacagaacaatggattcctctcaggcttgcctttaatcactgtgacacttaatgtgcagacatctgctcttctgtgggtcctcaaaacgcaagtccagagcctcctggagtcaccttgaagtctggctgcacgttgagcagtgagcacagctgaaagtacccaagagcccatgccttacacctcctgcacttctgctcagctttccctatcccagcacaagcccaaaggctatgtcgccttaacgtccccaacccactttcagtcattctacaagggccaaggaaacaagttcctctgggtctatatctgggcacacattgcccaacacaaccatcacatgaaccctagggcccacgccaacctggccttcaaagccccctcaggcacaccccatagac

SEQ ID NO: 26 - DNA, 3737 bp, Mus musculus
gagggctgtcggcgcagtagcagagagctacagactccgcgcgctccggagaccggcagtacagcgcgaggcagcgcgcgtcagcagccgccaccggagcccaaccgagaccacagccctccccagacggccgcgccatggaacaccagctcctgtgctgcgaagtggagaccatccgccgcgcgtaccctgacaccaatctcctcaacgaccgggtgctgcgagccatgctcaagacggaggagacctgtgcgccctccgtatcttacttcaagtgcgtgcagaaggagattgtgccatccatgcggaaaatcgtggccacctggatgctggaggtctgtgaggagcagaagtgcgaagaggaggtcttcccgctggccatgaactacctggaccgcttcctgtccctggagcccctgaagaagagccgcctgcagctgctgggggccacctgcatgttcgtggcctctaagatgaaggagaccattcccttgactgccgagaagttgtgcatctacactgacaactctatccggcccgaggagctgctgcaaatggaactgcttctggtgaacaagctcaagtggaacctggccgccatgactccccacgatttcatcgaacacttcctctccaaaatgccagaggcggatgagaacaagcagaccatccgcaagcatgcacagacctttgtggccctctgtgccacagatgtgaagttcatttccaacccaccctccatggtagctgctgggagcgtggtggctgcgatgcaaggcctgaacctgggcagccccaacaacttcctctcctgctaccgcacaacgcactttctttccagagtcatcaagtgtgacccggactgcctccgtgcctgccaggaacagattgaagcccttctggagtcaagcctgcgccaggcccagcagaacgtcgaccccaaggccactgaggaggagggggaagtggaggaagaggctggtctggcctgcacgcccaccgacgtgcgagatgtggacatctgagggccaccgggcaggcgggagccaccaagtagtggcacccgcaaagaggaaggagccagcccgggtgctcctgacgacgtcccccttggggacatgttgttaccagaagaggaagttttgttctctttgttggttgtttttccttaatctttctcctttctatctgatttaagcaaaagagaaaaaaatatctgaaagctgtcttaaagagagagagagagagagatagaatctgcatcaccctgagagtagggagccagggggtgctacaaaaatagaattctgtaccccagtaatcaactagttttctattaatgtgcttgtctgttctaagagtaggattaacacaggggaagtcttgagaaggagttttgattcttttatatgttttaaaaaaaaaagcttaagaaacattgctttaaaaaggaaggaaaaaaaatacagcaaaccattgttaaagtagaagagtttttaggttgagaaatgtactctgctttgctgaaaagccacagcttaggccctcagcctcactccctggcttgctcagtgcctacagccctgttacctgatacctgtgctttatcccaggggtgggcagacctcttaaccttatagatggtcagtgcgacctctagtggtctcatggcgtgtggcacaacccccctccccagggctcagcttaatgtgccctctccccccaacaacctgcaggttcacagcgccagccacacagcggtagggatgaaatagtgacataatatattctatttttgtaaccttcctattttgtagctctgtttagagagatgctggtttttgcctgaaggccctgcagcctgcccacatcaggttaaacccacagctttgtgtgtggtttgttttgttgtgttttctttctctatgttccaaaaccattccatttcaaagcacttttggtcagctagctggaggcagtgttgctggtgtgtgttggggggaggggttctaatggaatggatggggatgtccacacacgcattcagatggctgtacaacaggttgtagggctggtagtatgaggtgcttgggaagttttgttgggtcaagaagagagaactctgttctcgcaccaccgggatctgtcctgcaaagttgaagggatcctttggtgccagctggtgtttggaagtaggaaccatgatggcattacctggacaaggagattggggacaactcttaagtctcacacaggaggcttttaaacactaaaatgtctaatttatacttaaggctacagaagagtatttatgggaaaggctgcccatgaccagtgtgactcaaagcaatgtgatctcccttgattcaaacgcacacctctgccctgctggagaaggtttagggccatgtctgagagattggtcttttattgggcaacgggggggggggggggggggtccttaaaaaaaaaaaccacaaagacagagatttggtctgcttgacttttcccaacccaacccaattggccccattggagagccatccaaactgaggaaaattaggggactccaaaagagtttgattctggcacattcttgccgctgcccccaagttaacaacagtaggtaatttgcacacctctggctctgtgcctttctattaggactttttggcaaaaggtggagagcgggaggcttaagaggggatgtgagggaagaggtgaaggtgggaccacatgggacaggccacggctcctctcatggcgctgctaccgatgactcccaggatcccaggcgttcagaaccagattctcattgctttgtatctttcacgttgttttcgctgctattggagggtcagttttgttttgttttgttttacaatgtcagactgccatgttcaagttttaatttcctcatagagtgtatttacagatgcccttttttgtactttttttttttaattgtgatctattttggcttaatgtgattaccgctgtattccaaaaaaaaaaaaaaaaaaaaaaaagaggttcctgttcacaatacctcatgtatcatctagccatgcacgagcctggcaggcaggtgggcggtctgcctccagggatcctgggaccctgatggcgatcgtcctgtcatgctgggcccttcatttgatctgggacatagcatcacagcggtcagggcacctggattgttctgttatcgatattgttacttgtagcggcctgttgtgcatgccaccatgctgctggcccggagggatttgctctgagtctccggtgcatcatttaatctgttaggttctagtgttccgtcttgttttgtgttaattacagcattgtgctaatgtaaagactctgcctttgcgaacgcagctgcagtgctgtaggcccccaagttccctagcaagctgccaaaccaaaacgggcaccaccagctcagctgaggcatcccagccaggcaggacccttgagggccgctgtgtccatggtgatggggtgaggttttggccaaaaggccatagactggtggtgggtccacggaatctgccctgtgacatgaaaggctttgaggactctggctggtggccaggttggctttttgtatttctggttgacacaccatggcgcttcccagcacagacatgtgaccagcatggtccaggaaaaaaaaaagacaaaaaatctagaaaataaaattggtaaaatctcaaaaaaaaaaaaaaaaaaaa

SEQ ID NO: 27 - DNA, 888 bp, Mus musculus
atggaacaccagctcctgtgctgcgaagtggagaccatccgccgcgcgtaccctgacaccaatctcctcaacgaccgggtgctgcgagccatgctcaagacggaggagacctgtgcgccctccgtatcttacttcaagtgcgtgcagaaggagattgtgccatccatgcggaaaatcgtggccacctggatgctggaggtctgtgaggagcagaagtgcgaagaggaggtcttcccgctggccatgaactacctggaccgcttcctgtccctggagcccctgaagaagagccgcctgcagctgctgggggccacctgcatgttcgtggcctctaagatgaaggagaccattcccttgactgccgagaagttgtgcatctacactgacaactctatccggcccgaggagctgctgcaaatggaactgcttctggtgaacaagctcaagtggaacctggccgccatgactccccacgatttcatcgaacacttcctctccaaaatgccagaggcggatgagaacaagcagaccatccgcaagcatgcacagacctttgtggccctctgtgccacagatgtgaagttcatttccaacccaccctccatggtagctgctgggagcgtggtggctgcgatgcaaggcctgaacctgggcagccccaacaacttcctctcctgctaccgcacaacgcactttctttccagagtcatcaagtgtgacccggactgcctccgtgcctgccaggaacagattgaagcccttctggagtcaagcctgcgccaggcccagcagaacgtcgaccccaaggccactgaggaggagggggaagtggaggaagaggctggtctggcctgcacgcccaccgacgtgcgagatgtggacatctga

SEQ ID NO: 28 - DNA, 30346 bp, Homo sapiens
catgcctgtaatcccagcactttgggaggccaaggcgggcagatcacctgaggtcaggagttcgagaccagcctggccaacatggtgaaacccgtctctactaaaaatacaaaaaaaaaaaagaaaaaaaagaaagaaaagaaaaatagctgggcatggtggcgcatgcctctaatcccaactacttgggaggctgaggcaggagaatcgtttgaacccaggaggtggagtttgcagtgagctgagaccgcgccactgcactccagcctgggagacagagcaagcctctgtctcaacaaaaaaaaaaaaaaaaaaaaaaaaaaaaggggaaaaatcactccaatcatcccaagtctcagctcctactcttttgctatatgtccttcaaaccagctatgtatttattttgctgaatttatgctggttttatcttttgtatcttgctttttttcatttaatgtttttccatccagtgaacacaccctaatttgccattcccctcttcttgaacatgagattgtctctagggtatctcttgcaaataggataattgtcaatgatgtaacgggtctctatgcaacttgcaaaagtgatcagtcttggtgtcctcctcatcctagtgtttggttccaagcaacagaaaccaatgctggcagatttcagcagaaaaggaaaatcagatgcagaagataggcaggaacaagggaggcaagacagcacgaatcacaatggaagcatgctgcagatcttctctgatgagaagccagggctacccctacccatcccaacaccagaccctccagtaaaactgcagcggcccacaccaccttgtcaccagagcccacagctctatgatgggcagcacagatactgctgctcataaacttgaatgcctcacccagttctacactagaaaacatttcctaccttttctgattcttcccaccaccagctcccaattcaaaatcttgatccaaaaagatgaaatgtataaataatactatttataatgacatcaaaatatcaagtacttaagaagaaatctaataaaagatgcacaacacccaacacacacacacacactcacacacacacacctgcaattaaattaaggacaatctaaataaacagaggtctatatcatgcccatgaattgaatgactctgttagtaaaagtgtcaattccctcaaaattgatctatagatccaatacaatcccaatcaaaattccagcattgtgtgtgtgcacatgtgtaagttgattctgaaatgtttatggagccccaagggccaggagtagccagggcaaccataaaagagaagtgggttggaggatttagcccgccagatatcaagaattcgtagcgtatagcttccatgatgcttctggggtaaggactgaaaaagagaccagtggaacgggatagaaagtccagaaacaagagatttgtgttaagtgagcagattttagctgctctgttcacaaaaaaaagtaactatgtgagatgacaggtatgttacactaattcactatggtaaccattttactatgtatatgtatcttataacatcatgctgtcaagtttatttcaaaaataaattttacataaaatcttagcagtgttattcataatagacaaaaagtgggaaaattctatttttttaaagtacagaaactttattcctcaaaggggaaataggttaataataataagaagaagaattaaggccaggtgtggtggctcatgcctataatcccagcactttgggaggccaaggccagaggattacttgagcccaggagtttgagaccagcctgggcaacatagtgagaccccatgtttacaaaaattaaaaaattagctgggtgacgtgacaagtgcctatagtcccagctacttgggaggcgaaggcaggaggattgcttgagaccaggaggtcaaggctacagtaaggtatgatcgtgccactgcactccagcatgggcaacagagcaagaccctgtatctagggggaaaaaaatgataagccttgtgaaagagaaatgaaaacagcatccacacataaacttgtacctctgtgttcatcggcagcattgtccacagtaaccaaaggtagaaaccatcctaaggcccattgactgatgaatggataagcaaaatgtggtctatcaatacgattgatagtattcaaccataaagaggaatgaaccatggacacatgccacatgtgggccttgaaaacgtgatgctaagtggaaaaagccagatgcaagaggctgcatagcatatgattccatctgttggaaatgtccagaaaaggcagatccacagagaaagattagtggttgccaggggctggggaaaagggggaagaaaagggtgaataactacaaatgggtacagggtttctttggcggatgatgaaaatgttctcagatggtgatggtggctgtccaacataacaaaatccatcgaactatatactctaaacgagtgaactttacggtatgtaagttatttttcaataaagtggtttcaaaaaaataaaaaggtgaaccctaccatttctaggtgctttggagtttaccgtttttctccttgcattctggagtcagagtgagaaggcatctcagctctaccacagctgaatgatgtgttgggcttcggtttcctcatctgtaaaatggggataaagggcctctccttggagctgccatgaagattgaattagatgccctctgtgaagatgcagggcaggtggagagcacagtaagcgtctcggggggccacgccatcaccgccagcagggctcaccagtatctttgcccagagaatagccggggtctagggagcagccagggtctagggagaagggctgcttccctgtggaggctcctaactttcccatctcctccctgtttctcccctgcccaccccttactcctggaagtgtgactcgctgcctcctcccgtgactcccctacattgcatctccccagttactgtcgttatctctcatctcttctttccaaacagcctctgtctagcaccttggagctcgcatgggaattcatgggtgggtggattccaagcttggcttcatcagatgacaactaaaaggcagaggcctgggggggcaagggagctccaggatctgtctccctttggagaagcccaggttcaccttcccagcaagctgctccggccccacgcccctggccctcaataaccttcagtggctcccttcttgcagctataattcccctcttgggatgctacaaaagggattccagagatttttttttcaataactcaaaagggatggagtaaacgatatatgtgcccaggacaaggcagctaagggaaggcctcaggcttcctttgcctttgcctggaagtataccaacccgcagcccggagggccagcagagaaccaatgctcagagcctgggggcccaaggaatgctttccaggctggcggtcccaggagccccctctcccttccctatagcaagatactaagagcagaggctggcctggcaggccgtgtcgaggccctgagctcacatggccttggcagcttcttgacagtcgtgtctttttgtttccagcagtgacactcactgacccacacctttggccagcgtcccttgtgactgccccctcccgcttgagcagaatggctcctattacacaatgggtgccaggaacctggccagtccatccagagacagggcagagccctgggctaccgaccctctggggccagcagaaaccctccctatggctctgcctctcatcctggcattgacacttgtgcccttaattaaagtgcttcttttttaaatcaacatttctactccttttgcagagtaagagaaagaagagttaggggagaagaaagaaggaaggattcatggggttattttttttttttcatgtaaaagtttgttccgtgatttaaatctcatgtccacaaacagctcaggagaagtcagcatagagaagcaagctgacagattataaagtcatttgtaaaatcctctttctgcatataaactgaaatgtgtaattaattccacatactgcgtgtggcacatggccttcatcctgcataagaacaaatacatgaatgaataaatcgagcaggccttgacactcaccaggccctgtgctaaatgctttctacatattaccttaattactcctcaccgtggccttgcgaagaaaacgatcacagcccgttttacagatggggacagagatttgtccaaggccacacaactagtggcagatgtaggtctgtatgtgacattcttgttcagtttcataaatgtggctgccacctgcctgaaattttgagggaaaaaaaagtggtttggctttgcatgaattcttgaaaaagtagatttttatctttaccagcttctaagcaagctggatttattctgacagtgtccatgaaatggctacagaccatcaccgttgccaatgttgtgaacctgaacaaggcacctggtttctctgtgcctcggtttccttaccattaaacgcatttccctgagattaagtgtgtgaaactataagttggctggaggaaacacctcatagaagtgagaagatgaggatgggtggtgagtgaaggctttttctccaaaccctacaggagatggacctcaaagcaaatggccatgcttcccttagactgggtgaactggtgctgctcagggctagaagtgtgtctagaagcatggggaccaatgcagccccctccaccctagggcacataacctgtctctctcccataggatagcagagacagctctctaagtcaggattcagcgagatggtccaggaggggcctaaggattcctctgacttatccaagcctggggaggcaacacaacctagcctgtgtctcagggggccccaatcatgccctgaacctcatgagcccaggcaggcatcctgttggttaaggtcggcctcagggtccagggatgcactagattctttatcttaaagtgaccctcaagaaaaaaaaaataaaatgtagctataggcagtttctggacgttttcctatttgttaagcaccttcttgctccgagctttccagccacagtgcactggacgccatcggaaggctgcagctgctatttggtgctttaccaccgctgagaaggtggaatggtcacggcccggttctgtcactttcttcagccggacagtcgccttattacggattccagtagggccgagcacactccttcctgcccgtctttacagatgaacatgctatcgctccagcagtacaacccgccttattacgtaaaaaagcagcccctatctacccgcagggaaggagtatgttcggcaccacagctggactggtgctcgagttaagcgtcctgggaggtccgcatgcgctccggaaccgtaatgcgcgctttttctaagccttacggtaaacgcggacgcagggcaaccacgtggcggtggaaccgaggcccggcgggaatgcgcggaatgcgcggcgcggcctcgcgcggttcccgagccacggcccagggtccggcggcgcgcgctctcgcctcctcccctcacctctcccagccgcaccccggccctggccctgccacccagaactcgctgggcaagtcgtgccccgcgtgaacacacagaaggggcttggggaccgagcgcggcccatcagtccctcagaccctgaggacccagaattccctaaggggtccgaatccgagtcctgcccccagcccttaaggcacgggctccagggaccccaggggaagggcgcggggcattaggtacgcaacccgtttccccgcacctggaaaaaaactccctttccctcccctcccctgcttgttgagtgtgcggataaccagaactctaaggcgccccgtaataacgaccccgctgtccctccacccacccccaagtgccaaagcgagggatggaagcgctttcaagcgttccaagggcattgaggagcgagctggagaggcgcggggatgcggggtcctccccgcagtcttccggaaagggcgggggagggcgcggcaagttccggagtggggcatgccgtgggagcccacgagggcctcagcgcggatcctccgccggaaaaccggctcccgcgagccgccgccgcaggtttcctaggccccgcgagtcccgcagcgaagccctgcgtctccgtccgacgcgggggtctgctcagcctcgggtgggccgcggccaggcctgactgcgggggagagggccgaacgtgacctccgaggtcacccccagccagctttctctcctgtggtcggaagtggttttcttctcgatctgggcgcctactccccaccacttggtctgagaggggctggggccggaaggccagggaatctctggtggatttgggggttcatattgctcagggtaccagccgatgcgttttgaggggcgggagtcgaggaattagaatcgcctttaaccctcaagagttgcgccttcagcctcgggatcccagatgcgtcgttggagccagggccgcccccctacctgttgggtttgcgttttaactccagcgcacaccttgccggcagccctcggagctaggggaggggtctcgtttccccgcagcccgccggacagacgactggggcacgggaggggcggtggcagggtggtctgtgtgtggctgaaactaattgatctggagcggaaacgcacgtctgcggttggggcgatggggggggcggtgcggctgtccatgtgccgagcgtgtggctgtctcgggtgggcactggggccggagttcgccccggcccacctcgcagttttggggcgcctgggatcggcgctacgtaagcgaagcagagctgccatagcacgtgggccgccacgcgcaccccaaaagcaagcagtgtggggggaaggggagctcgagcgccttcggagcccaggggccggctttcggaagcgttttcccgggcgacttaagggcttaacaatggaaaactcgcggagcctgagccaagtcctttcaagtcgccgccaggtatgcggctgcaggtgaccccacctgggtgcgcccgcccgccagccgccctggtggaaaagcgggtgcgggaggtcgctggcgaaaggtcgggactggtccctgcaccacccgcccccaacccaagccccgagccccgcggcgcgcagccgcgctgagtcccggggtctgcgtcgcggcgcgccggttcctgaatgaacgcgctcccttcccccgcctgaatgaaggttcccacagccagggacggtggcgaacacgcgcctgcagcggaattcgctttctcctgaccgaccatccgcccaggccgcggtcaccggggcgggggccagggggcgaggaaagcgtgaaggtgatttcagttaattttggattttctttcaaacaacgtggttaccctcccgactgggccacttgccctttgtctccaaatggtcaccaagaaataagaacagagcactttaaatgagcccagaatccgcagttcctgcttcgtggtgggttttaagaagacagtgtaaagtaaaactgcaaccgaaaagttttttaaagttgcttttctctttggaaaaaataaaatcaaaatgctttctctgcgcttcttgaagcaatgaccctcaaaagcccagaggtattggccccctcgggggacccgggggccgccaagcagggttcccccaggtgggggctgggcagctggcgctccccgccgggccccaaattccagcgccgggcccgcaaattccagcgcctcccccgcgggttcctggacggctctttacgctcgctaaccgggcttgcaattttgcgctcgtccctgagccgggaaatcaacgaagttcctagtcgagatctgcccggtccgcctagtaacagcgccgcgcccccattggctcatgctaattccagtttcctctgtcttgcgcccgggatgggggggtgaagctccctcctggacccagagccggttgtgccggagtgggcgagcctctttatgccctgctgcccctagccgacttcggcccgcttcgcgcctcgggctgggccagggcgcacgcggggctcggggcccctcgccccacgggatgggagaggccgggtgatagctccgggccccataaatcatccaggcggccgccgggtcgggattttatgaatgaaaaagcagctgggccgcccttgtgcgcgggctgatgctctgaggcttggctatgcgggggccaacgcgattgtgggtgctcggggagtgggggggggcacgaccgtaggtgctccctgctggggcaacccatcgctccccatgcggaatccgggggtaattacccccccaggacccggaatattagtaatcctaattcccggcgggggagggggcgcgggaggaattcaccctgaaaggtgggggtggggggggtcgcatcttgctgtgagcaccctggcgaaggggagagggctttttctatcagttttctttgagcttttactgttaagagggtacggtggtttgatgacactgaactatattcaaaaggaagtaaatgaacagttttcttaatttggggcaggtactgtaaaaataaaaacaaaagttaagacagtaaaatgtccttttattttttaatgcaccaaagagacagaacctgtaattttaaaaactgtgtattttaatttacatctgcttaagtttgcgataatattggggaccctctcatgtaaccacgaacacctatcgattttgctaaaaatcagatcagtacactcgtttgtttaattgataattgttctgaattatgccggctcctgccagccccctcacgctcacgaattcagtcccagggcaaattctaaaggtgaagggacgtctacacccccaacaaaaccaattaggaaccttcggtggtcttgtcccaggcagaggggactaatatttccagcaatttaatttcttttttaattaaaaaaaatgagtcagaatggagatcactgtttctcagctttccattcagaggtgtgtttctcccggttaaattgccggcacgggaagggagggggtgcagttggggacccccgcaaggaccgactggtcaaggtaggaaggcagcccgaagagtctccaggctagaaggacaagatgaaggaaatgctggccaccatcttgggctgctgctggaattttcgggcatttattttattttattttttgagcgagcgcatgctaagctgaaatccctttaacttttagggttacccccttgggcatttgcaacgacgcccctgtgcgccggaatgaaacttgcacaggggttgtgtgcccggtcctccccgtccttgcatgctaaattagttcttgcaatttacacgtgttaatgaaaatgaaagaagatgcagtcgctgagattctttggccgtctgtccgcccgtgggtgccctcgtggcgttcttggaaatgcgcccattctgccggcttggatatggggtgtcgccgcgccccagtcaccccttctcgtggtctccccaggctgcgtgtggcctgccggccttcctagttgtcccctactgcagagccacctccacctcaccccctaaatcccgggggacccactcgaggcggacggggccccctgcacccctcttccctggcggggagaaaggctgcagcggggcgatttgcatttctatgaaaaccggactacaggggcaactccgccgcagggcaggcgcggcgcctcagggatggcttttgggctctgcccctcgctgctcccggcgtttggcgcccgcgccccctccccctgcgcccgcccccgcccccctcccgctcccattctctgccgggctttgatctttgcttaacaacagtaacgtcacacggactacaggggagttttgttgaagttgcaaagtcctggagcctccagagggctgtcggcgcagtagcagcgagcagcagagtccgcacgctccggcgaggggcagaagagcgcgagggagcgcggggcagcagaagcgagagccgagcgcggacccagccaggacccacagccctccccagctgcccaggaagagccccagccatggaacaccagctcctgtgctgcgaagtggaaaccatccgccgcgcgtaccccgatgccaacctcctcaacgaccgggtgctgcgggccatgctgaaggcggaggagacctgcgcgccctcggtgtcctacttcaaatgtgtgcagaaggaggtcctgccgtccatgcggaagatcgtcgccacctggatgctggaggtgcggggcttcgggcggctctcttaagacttccctgcaacttgttgcccagacccacgtttctttgctactcacccccctcccttctctcccgctagaactttgaagtttgccgtggtgtttctagggatccgtattttcaaaataaaaattgcgggtattttctgaaggaggaaggggtgggggtgggggtgctagaagtagcgtttcgtgggaggggagaagggggtccgggaggggtgccttcgggagaagccagtgccaggggcaccccaatgggcccgagggtgcgggctggcaggctgggtgcgctttgtgtcccccgcctgcgccccagcccggctgcgcctcagcggccgggagccgccaactccggggggagggggcatagatttgatttttaaattaatatccatggacacgtatgcaagggccgctcgtgccagtattatgcgccatctttgctcttttattgcaaagcaaaagtgtttattaataattgggggcagggtgggggcggggagcggccgccgggcgctggggccgcagctaagggccgcgcggctgccgggagcccgcgggaggggcgcagggacgcggcatgggtagttttggggggaccccgctagggaagggggggcctttgttcaagcagcgagtcccggggcgccccgaacgggcagcctgggccggagagcacggcgagctgcaaggtcgcgtggcccccaagacgccagggcttgatccccgtctgcagggatatcggcttggaggaccttctccgagcgagccgggggcctgggagcacattttcagaccttcggtgggcgcctgaggggcccgcaagtattttaaaataatttttgaaagtgcggcgtggtgcccttgcgagagggaaacgccgcccgcgcccagggggaagggggggccccggagtttgaattcctggggctccccccggagcctgtaacgaactcccaacccccggcctgggtaaagggtcgcccgagggtcattttcagggtttttttatgcacttagttatttttttaatatttttaaatattttttgaaaagatgacgtctggggaaatgcggcgcggcggcctgggacgccacctttgtgtctcgcaggcgcggcgcccaaccccgcggcccgttccgcggccccgcaccccagttggtgtcgacccccagtcagagggaccacggagctccagggcgggccagggtcccgggggccggcagcccgcgccgccgcgcacgccgcccagctgtgcccgctcccgcccccaccgtgccagcctcgcggggactttccctttcagtttcggggagggtgggtactggggacgcgcgggggagggggcgcatcacgggaagctcctgccgcccccagccccgacccctcggcgccctccagacctggcggccctgccaagcgcgatggggggtgcgggggcgtgcgggggggcggcgcgacctggcggcggcggtcacgggccccgtgcctccgtaggtctgcgaggaacagaagtgcgaggaggaggtcttcccgctggccatgaactacctggaccgcttcctgtcgctggagcccgtgaaaaagagccgcctgcagctgctgggggccacttgcatgttcgtggcctctaagatgaaggagaccatccccctgacggccgagaagctgtgcatctacaccgacaactccatccggcccgaggagctgctggtaaccactggaccccgccgccccccgccccccgcgagccgcacgcaggaccacggggccggggaaggtgcaggcggtggcggccggcccgcctctgacatatctgctcctccgagggagggcggccccgccgccgggcgtccctgtccggggagcgggcgggatcctagccgccctcgtcccgccgccctgtgtgcgcttgcctgcgactcccaccgcgttcgcgccccgcggtgtggccgaaaagtgggcggcgcgcgccctccagcggctgcacgaggagcgccgcgctcggcgctgagcctccagttccaggtggtgggaggtctttttgtttccacttgcagagtcttttcacgcggcgggcgccttttctgttttgatctgggattgcgtgttgccccagctcccttgagtccccagcattcgccagccctcccctccaacatccaggaccgcacgagacgcaggggccagtgctctgagccggaggtgcggcgtggcccggcccccgtgctgccggcttccccgcgcccccgggctggcccgcacctcccctgatggccgctcaccctgtgttcgcagcaaatggagctgctcctggtgaacaagctcaagtggaacctggccgcaatgaccccgcacgatttcattgaacacttcctctccaaaatgccagaggcggaggagaacaaacagatcatccgcaaacacgcgcagaccttcgttgccctctgtgccacaggtagggcaggcccggcagcccccggcctccccttgagagccggctccttaggtgaccctggccggcttcttgctctccacctgggtgctgtctgggaagatgtccccagaccccctcctgcgctggagagcgctcttccagctctggtgagcagaggccctggattgtttgtcgcgctggatggagggagatttgctccctcacggccaccatgcagtaccttgggcattggtgtggacggctcagcctgcctgtgtcccgttactctggcctcgtccttcaggccaggcagcctgtggccactccatgctgaaaggggtttaccttggccacagggccgcctcctttctccacccacctccagcccttcttgtgtccttaaggagcctgagctgcagaggccccctcctggcctctcccaggctgggccacctgccagaggcgcctccaggggcggggagagctgtcggcctgcctgcaccacgtgctctgggcagccgagtgcaggggtgtccagcagaggagctcggctgcctgaggccctgccaggggtgccggcagccagccgggctcagctgagccctgagggggcgcttcagagcactctcagcttgggccgccaccgtgggcagcagaagcacccagtcctcacttcccctggcatggccccagaggcccctccctgacatggccttggccccagaacccagtggggacagactcgcacatacacagggtgccgcctcctgctgtccccagccctgcctctgacccccctgtgaccgcctccttccctggcccaggaggcctggttaccttcatgggggagcatggccccatcccacccagctctgctgtggcccacctttggtcaagcctcagttgtcacatctgtttgggggctcactctgggtgacctaggccacaaggcccacggggcatcaaagaggcagtagcatcttctcccctccccagagggcagagccccccaagcctacttcagagctcccttctgacaccggtagcccgcagccggtattccagaatgggttctggtttaggcgtgaggcctcccccacctcctccacctgcttggggcatgaacccctcccccacgtttccaagcgagtccccaaggtgggcagatgaagatgccaaggatgtcgaccagtctggatgggtctggggtgggggggcatgcggcagacagggaggcattctctggctggtgctcctcagaggagagaggcctccggagactccagacagccttttatggagctgaaagtggcttcagagaaatgcaaagtttcctggagagaacgtggggcgtggttcttgcacagcctccctacagggtggctccagcagtggagctcccctcccaggacccctgggtgctagtgggaggcagtgggcaggtgcagattctcgtccttcccactactgcacaccctttgtctgcgaaggcgcccccagcggtgggtgaaggaggagggacacttggggacccagctgtgcacgtgctctcagtgactgtggagtccactccagggtgggtcccgagggaggggcaggagaccaggggacccacccctgcaaagtgctccgggtcctgacccgtggccaccccatggaacgtaactgagcagccagtgccttgttcctgctggacatctgtggagacaagagtgacttacggctgcttaaagtcagaaacaggttgaaggaggtggaggcgtgggaaagagtctaggaaggtgtttttgccctccacgtggcaaaggttacatttaaaggtgatgctgggtgttctccctgcactaggcattcctggccccaggtccccagcaggtgtgcacatgctgcatacactcacgcatgggggtttcagggcaggtgcgcccttggctccgtgggaggccaggtgaggaacgtccagtgccaaggagcttccgggacagctgtcacttccctttacaaccaggcagcggatagggtcaaatcctggagctttggtgtctaattctgggtggctcctaatctaagcacagacagcaccacacactggggtgggggcacgagcttctgaaacaacgtggccccagtgactccacgctgtgtgtgcccctggagacgggggggtgcacaaggtgcggagccagctagaacctgtcgctccctgcagaagcggtttctgtgtgcggttctgatttgcctcaatgagaaggttttcattcatggctcccggctctcagactgggtggaactgctcccatttaaaggggaaaagaggtggctcggctcgttaaggatttctttttctaagttgttacggcgcccagcagccggctttgtctccccttcagggtggctgcctttcttcccggcccctcgccggcggccctctctttaacaaggccgaagttgtttattctctcgggatgaagtctcggatgggccgccacacccctggcggcccgtgggggcccctctccctttgtgcctgggtcggctcccattcagctcccccgaccccccttgttcccgggcgctcagtggcgcgagatgaggcgatggggccgacaaagatgccacactcatccctgccgacctccggctcccagcccagggcccctggttcctgtgcagaattcctcgtgggtgtgacaaaaggctgcccccaggctccgctggggtgggggccaggccaagaggcacatcccacactggcccacctgtccacggtaggcgcatgactgccctgaggaggggaggccggcattccccgccacaaaccaggacgtaattggtggcagggctctctgtggaaagagccagtctgctgtttgtctaggaggtcagtcacagaggccccgagacgcccactactgcagcctggcaggcggatgagcccagtatctggcagtgaccagagggagttttgtgcagaccacaaaggctgatgggctgccctagattggtgtccctcttggaagtgggcccagatgtgcgggacagtccccaggaagccccaggtgagggcactggtgccctcttgggaaagctgctccctcctggggcccggctcccggcccagtcctccaggggtgtcccatggtgactggtgctaggaaccccacacctcttcccttacttgggaagtcactggaattgttgggctacatcagacggcccagaaaagtgtttttgtcatcggccagaaataggagagttgtgagtagagggcccgggtggagttggggtgtacttggtctgtgctctgaaggtcactgtgacagtcatggtcccatggtaaggggcatgggttgctggaagagctcttccttcccgagtgagccaagccgggctctcctggcgccagggcctgagccgcagccacaccacagccgccctgaaggctgccggccagggcttacccctcaagggacacggaatggcttcatcagtaccctgcagccccgtggcctggcccgggtggaggcctaggcttcagccatgcgatgtcccttcagaatatgacttgtctgcaatccctgctgctggggggtggcaggtacttggggtgagggttagggtcatagaagcgacatctctacgtcctcatatttgcgtcatctaattttgtttttgtgaatacgtgataacattcacaaggctcaagatgctaaaaggatgagaaggcagtgatgtccccatcacctgtcctgtgtcttcccgtggctttctctttccttggttatgtttgagtcaacagtggggctgacgttccaggagggtccgtgggccaggctcttgctctccgagtgcccagggatggctggaggctgaggagggcctggatgtggagcctcagataccaagtgcttcccttcaggccgggccgcttgctcagagccagcacacagggatgcccggatcacgggggccctgagagggtcccctgctcacagcctccttccctctctccttctgcctcagatgtgaagttcatttccaatccgccctccatggtggcagcggggagcgtggtggccgcagtgcaaggcctgaacctgaggagccccaacaacttcctgtcctactaccgcctcacacgcttcctctccagagtgatcaagtgtgacccagtaagtgagggtgatgtcccaggcagccttgccggggcttacagggggagacacctagtgccacggaaatgccgaggctggtgccaaggcccccaagggtgacaaggttggggctggggctgggcccctcggaccccaggccacagactgacagggcaccggcttcttccactgctcctagaacttactgactggctgggaggtcctcacagccttctcacgtcccctggggcttccaggagccgtagagtttctgggcgaagcgtccgggacggaggccccaggcggccccagccaatggtctgtgtggtgatggtgtgtggggttaggcccaggcgagctttgtttgggccacaatgtgcgtggccaataaatagatgcttgaaaagggctcctgtgaggtccgagacaccggacaacgggcggatagagacagccttgttgtttacggcctctttgagaggctgctgctgttaaaccctgggatgactgtgtctttcttcttaaaaatgccattgttttattcccgagtcttttcttaaagaaagaattaaaatgacaatcaaaagggtttgtggcatttaccaaattagaccagagaggtggccgggtcagccgccggccccgcggtgtgtgagggagtgaccgcctgaccccagcttggggctgggtgggcctgcaagacccgttttggctctggcctgggccgcctcttggtggtctgccctcgagcctcccggggactccgcacgggtctcagcagatgctatctagggtccacctgcctgtcccctgcctagtggtgcctctgtcccggggacactgggagtagcggctgcccagcccatgtgtgtctcggaagaggaagaagcttttttgccgtgggacaccgaagttggcaggggcctcccttctgtgttctcggccatggcctcccttgcaccctgccccgtgttatcctttgggggtggtgaggtgtcctcacccgctgtagggtggaggccagcagcccgcagctctctcaggaaaatggctcagaaacaccatcgaggcctccagaagcccagcaaagagaaagcccctccatcaaaatgaaactcgcgtctgcacttttcatttcgaactccacgccctgagtgaaaaccgcttccccgccaggggtgactgccctgggatgttgctgtcttcgggcagttgtgggaagttgggcgctggcccttatttgagtagagaccatcttaactagattggaggcacacgtctcacagctgacagacacacggggtgaagttacccgaggcggagtccactctgcctgatcagctagtgaccaacgtagctgagcccagactcagaaaaaccgtccacagcagaggcccctgcattttctagggcgtgttctagaattttctttggtgggtggaatgtccatctgtgcaaatcgggtgcgcagtgccacacaccagtgacttttcgcggaggagcgtgctgcctttttggagcttctggctgtgggagaacagctttgtccaccggggtagccttgcaggcagctgtggggccagaggaatgaaggaaggtcctggagtctagctgcatgtgtgaccctggagtgggtcatgggcgagggacgggccgcaggtgaagaatccctggatggagctgccaggcccctggggctgagaattgaagctggctggtgttttaggttgaacgtcaggagtcttgtatctcaccccaggcctctggcctcagtttccccatctgtacagtgggactgtttgtgcagccagcccggccagcttcatttgccatgatgagaatttatctgaggggcgggagaggaaagccctccctataaaggtacaggcgctaaaatgtcatgacctcagtggtccacctaaaagtcgttctggcctgggtcatcgcctgtcgtgctatgcctttgtccagccccttctggttgggagttaagtggcacctgtgcggcacgtggtggggctgtggcccagccctgctccttgtggaaggtctgtttcctgggctgcctagagacttggcttgaagccctagcgtggcttcctggcagttgggacacacacagccccaacacatggagccggttctccatccagaagcccccgggcagtaagcagccacttcaggctgcgtgggacttgcccgtggtggagcctaggagaggcccctggctgggcgtggcgttccagatttcacggctgctctttcccactgacagtgtggtgtggacgctgccaagggagtctggagccccagagggtggaggtgcaggacttccaggagcgtccgtcgcactccacccgagggcgagcacctcagtggccgcagtgggtggatgcatgctgtgccaggctgatggctggccccggggcacaggcctgagcgggagaggatggaggggagggatcaatggtccaggtccccctggccacccagcattcatcctcagtcatgcacggcccaaggcttcgacagccattgatcatggaaggccaggttcacctcaagggctgccacatggagaggttaagtctgaaaaggctgaaaaggcagggttaaaagggcctcctgtccagatcagatggcactgaattccccagggagctggcacggccagtgggaacaggcggtgaaggcgctgttggacatggggacgggcagggggtgtgcagggtgggcgggcaagcatctggtgtcttgtggctccagagaccaggtgggaggtggaggcgtttggtcctgagtgtcctgacaggtgatggcagctcccacatctcgctcaggttcagaggaggcagcatgggccgagggacagtttttggcttagtcttgctcttataaaggcttccgggtcatggcacctgggaaggggccctcgctgcaggccccttctaaggaccccctcttcccacctctccccaccctctctctctcaggactgcctccgggcctgccaggagcagatcgaagccctgctggagtcaagcctgcgccaggcccagcagaacatggaccccaaggccgccgaggaggaggaagaggaggaggaggaggtggacctggcttgcacacccaccgacgtgcgggacgtggacatctgagggcgccaggcaggcgggcgccaccgccacccgcagcgagggcggagccggccccaggtgctccactgacagtccctcctctccggagcattttgataccagaagggaaagcttcattctccttgttgttggttgttttttcctttgctctttcccccttccatctctgacttaagcaaaagaaaaagattacccaaaaactgtctttaaaagagagagagagaaaaaaaaaatagtatttgcataaccctgagcggtgggggaggagggttgtgctacagatgatagaggattttataccccaataatcaactcgtttttatattaatgtacttgtttctctgttgtaagaataggcattaacacaaaggaggcgtctcgggagaggattaggttccatcctttacgtgtttaaaaaaaagcataaaaacattttaaaaacatagaaaaattcagcaaaccatttttaaagtagaagagggttttaggtagaaaaacatattcttgtgcttttcctgataaagcacagctgtagtggggttctaggcatctctgtactttgcttgctcatatgcatgtagtcactttataagtcattgtatgttattatattccgtaggtagatgtgtaacctcttcaccttattcatggctgaagtcacctcttggttacagtagcgtagcgtggccgtgtgcatgtcctttgcgcctgtgaccaccaccccaacaaaccatccagtgacaaaccatccagtggaggtttgtcgggcaccagccagcgtagcagggtcgggaaaggccacctgtcccactcctacgatacgctactataaagagaagacgaaatagtgacataatatattctatttttatactcttcctatttttgtagtgacctgtttatgagatgctggttttctacccaacggccctgcagccagctcacgtccaggttcaacccacagctacttggtttgtgttcttcttcatattctaaaaccattccatttccaagcactttcagtccaataggtgtaggaaatagcgctgtttttgttgtgtgtgcagggagggcagttttctaatggaatggtttgggaatatccatgtacttgtttgcaagcaggactttgaggcaagtgtgggccactgtggtggcagtggaggtggggtgtttgggaggctgcgtgccagtcaagaagaaaaaggtttgcattctcacattgccaggatgataagttcctttccttttctttaaagaagttgaagtttaggaatcctttggtgccaactggtgtttgaaagtagggacctcagaggtttacctagagaacaggtggtttttaagggttatcttagatgtttcacaccggaaggtttttaaacactaaaatatataatttatagttaaggctaaaaagtatatttattgcagaggatgttcataaggccagtatgatttataaatgcaatctccccttgatttaaacacacagatacacacacacacacacacacacacacaaaccttctgcctttgatgttacagatttaatacagtttatttttaaagatagatccttttataggtgagaaaaaaacaatctggaagaaaaaaaccacacaaagacattgattcagcctgtttggcgtttcccagagtcatctgattggacaggcatgggtgcaaggaaaattagggtactcaacctaagttcggttccgatgaattcttatcccctgccccttcctttaaaaaacttagtgacaaaatagacaatttgcacatcttggctatgtaattcttgtaatttttatttaggaagtgttgaagggaggtggcaagagtgtggaggctgacgtgtgagggaggacaggcgggaggaggtgtgaggaggaggctcccgaggggaaggggcggtgcccacaccggggacaggccgcagctccattttcttattgcgctgctaccgttgacttccaggcacggtttggaaatattcacatcgcttctgtgtatctctttcacattgtttgctgctattggaggatcagttttttgttttacaatgtcatatactgccatgtactagttttagttttctcttagaacattgtattacagatgccttttttgtagttttttttttttttatgtgatcaattttgacttaatgtgattactgctctattccaaaaaggttgctgtttcacaatacctcatgcttcacttagccatggtggacccagcgggcaggttctgcctgctttggcgggcagacacgcgggcgcgatcccacacaggctggcgggggccggccccgaggccgcgtgcgtgagaaccgcgccggtgtccccagagaccaggctgtgtccctcttctcttccctgcgcctgtgatgctgggcacttcatctgatcgggggcgtagcatcatagtagtttttacagctgtgttattctttgcgtgtagctatggaagttgcataattattattattattattataacaagtgtgtcttacgtgccaccacggcgttgtacctgtaggactctcattcgggatgattggaatagcttctggaatttgttcaagttttgggtatgtttaatctgttatgtactagtgttctgtttgttattgttttgttaattacaccataatgctaatttaaagagactccaaatctcaatgaagccagctcacagtgctgtgtgccccggtcacctagcaagctgccgaaccaaaagaatttgcaccccgctgcgggcccacgtggttggggccctgccctggcagggtcatcctgtgctcggaggccatctcgggcacaggcccaccccgccccacccctccagaacacggctcacgcttacctcaaccatcctggctgcggcgtctgtctgaaccacgcgggggccttgagggacgctttgtctgtcgtgatggggcaagggcacaagtcctggatgttgtgtgtatcgagaggccaaaggctggtggcaagtgcacggggcacagcggagtctgtcctgtgacgcgcaagtctgagggtctgggcggcgggcggctgggtctgtgcatttctggttgcaccgcggcgcttcccagcaccaacatgtaaccggcatgtttccagcagaagacaaaaagacaaacatgaaagtctagaaataaaactggtaaaaccccagcgtggtgcctgcctctttgcttcctgggctggccgtgagccagggacgcgtgtcctggtgccctagaaccagggcagggtggcaggcttggcggatgtgggaggccgcagcctgtcctgtgcgctgtgggaagttcagcagcatcctgacctccatccccgggatgacagtcacgccacccgccgtgacaaccaagaatgtctcctgacactgccacatccccgggggtggggacagaatccagccaggagcaggcacacccctcccaactgggaggaagccctcagcacaggtgtgtgaggtgggaggcggtgtcctgtccccgggaggctccagagaataatttgcaggctgcctggctgggtgagcccacctccaaccacgcgagacaacagctccggcctgggtgacgtgagcggtgcccattgatggggaacatcttccccctcttccttgccccaccagtttgtcttcccgggttatttgcagataggaaaataaataaagccggcattcgttaaccctcttctggcgcaaactgctgtttgctctggatgaatcatggtcctttggcgacgccaggctccgggagagcaaagcaccgtgtcagggccatgatccggggtggcctttcactgggatcgtggggacctggaggccgccttataggacacccatgacgcccacctctggatttcaggtgcacgtgactggacttaacttcaaaccccagggtggaggcaggtagtgggagtgccctgggaaggtgtcctcggaccttggtcactgctcctgaacccatctgtgaggctggtttgtcctcatcccaagctaagtggaagctcaggtcccaagccaccgatgggtgctacttgtcagctgcaggttgaatctccgtggcctttatgaagcacctgctgtctacccttcctgccttgtagagcactcctcccagggctcaacagtggggccggggtggtcggtgtgttggctccacaggcgcctgccctgggaggaaggtggggtgtggagggaaacgcttggcccctgtaggtctccaccagcctctcccctgagggtgggggctccgggagccttcctcgagggagtcctatattgagtgggtgggggagcctgcaaggtgcccctgacaggtcacatcagaaagagctcaagggacagtcggagccagaggtgacactggtggccactcgggtggctcacaaggcccagctcctccttgctcctgggcaaattactctgaaggcagggaccaggtctgcaccattgcggctctccagttccaggcaatggccaggtcctgtgtcagggctggggtcctagggaagccatgtccccacccccggcctgcagctgggtttacattcatcccccgagagcacatgggtgtagcaggaggcctgtgcagagagctccgaccatcgcacagggcacctttggttgtttcacggagcaggcaagggagccatcggatcctgttaggtttgagcaaggatgtggggaagaagctggagagccactttgccatgcagggagaggagcacatgggtctagggatctactttagtgtttggaaggttttttaagatgaaagagggatgtgtaggctgataggtctggcagagccaaaaggcagcgacatgtctactgggagagatggagctgagcgcggggctcaggcagggtggcagggcagggccggggccctgggtgggtcaggtgggttcacagccaagtgtgtagagagggcttgggcccagagtgaagcagttgcaagctctcccacaacccattctctctgtctcggcatctgtggcatcccgtgatgggtgggtctgtacacaccccacccctggctgtgccacaatgggggtgtctgtacacccctcacccctggctgtgccacgatgggggggtctgtacaccccccatccctggctgtgccacgatggggggttctgtacatcccccagtgatgggtgggtctatacatcgtggttatgccacgagctccaaggctgtatcagtccgttttcacactgctaacaaagacatacccgagactgggtaatttataaagaaaaagaggtttaatagactcacagttctacgtagctgggaggcctcaccatcacggcggaaggcgaaaggcccgtcttccatggcagcaggcaagagagaatgagactcaagtgaaaggggaaacccctataaaaccatcagatctgctgagacttgttcaccaccatgggaacagtataggggaaactgccccatgattcaatcacctcccaccgggtccctcccacaacacgtgggaattatgggagctacaattcaagatgagatttgggtggggacacagccaaaccatatcaaaggcatcgtctggccactctaggcccttgttcccaactctcaaactccactgacatcacctctgtgcctgcaacccctcctgggattcagtggagacctcgtcccttgttggagtatctgcgctacccagagggtgatggtaaaaactgacctttgaggaacttcagagacaaagccttccgcagtcagctctccctgcagccccttcgcagaagcctgtcctcacacgcccgccacccctacctgccctgcctcctggcccatctccctgcagccagacagtcctcatccattcttcatcctctgcccccaacccccagccttcctatctcccttcagctccgtccaaggtccctgggactcagccccatctctccccagccttgaccccaataagctcgatgtctttgcccaggagctcctgacacaccagactgcatccagcttcctgttctgcgcttggcccaccgcctcggtccacaggaaccttcatctctgctctgactgtaaggatgggctctctgagggcttccccaccccacagcaggcaggtggttctgggagtctgggattgtcatgcctgggcaccttcctgctctggctgagcccctccaggacggaaatctcccagatttctctctgcctccgtctccccaccctggcatacagtgggtcctaggaagggggccgaatggaagggaggtcgtgtcggctcctacagggcagccccaagctgctgggctgaggtgcagagccatgggtccagcctgacccgcatgccgggagctgattccatggctggaagggtcgggggttccccaggagcccagacagcacctagagttgtcacaaggagtgaaaggccctgaggggacagaggaaggaggctgggcagagtgggcacgtggacttcggaccgcgcttgtgggataacagtggctagggctgtgcagagggtggtgcactgcccatgggagtccagagaagccaggtccagtggcagtggcatgcatccggcaatccctccggctaccctgcatgcagcgtgaccctccttgaagcaccccaggaagcagtcacagcctcgctctgcccagcattgggggcctggcctctgaatctggtggggaaggctgtgttgcctgctggcacccgctctatcaccagtcccaccataaggctagtccccaaagtcagcactgcagccagggccagcgagggccagcaagggcaggcctgtgcaggggctgcagcgtggggtgtgcgtcccgcactctgggccagcctcgcagctcacagggctctgtcatcccaggaatgtctttgatcaagagtttatgcaagacgaggaaagcaagcccaggacctctaatccgttcccacagtcccctgcccgccagggccccacaagcccagcgccacaccgccaggcctgagcagacaatagcaggcggacgggtgggcgggcagctctggggccgctggccttggggcccacatccgggagcattgtcaccgccactcacgagggcacacaaggagggctggggaagagagaatgcagagccctctgctgaaggggcttcggtgggccttgagcctttcaaagacggcggtgtccattaatccttttaatttgcacctagcggcagctgagacaagcctctcaaccggcagccactttaagagctgagtggtctaacccgaggatcagctcctattccagaccctgggccctctgagcctgtcgaggcagtcctccttgcctttgtttaatcacgggaggaatcgcagctggaggttactgagcacgcactgtgtgccttgtgctcaacaccgaacacagtttctctctgagttttgcaacgaccccatgggttggtgacagggaggggacactctggtggcagccacagacacagccctgccctcccagagcctacactctcccgcacacaatcatcccatctgctaggtcagggattggcaggttttctggaaagggccacagagagaggcttcaggctttgtgggccacaggttctcttgccctgtgcaaaagcagctgcagccgctctgtgaatgagtgagcatggctgtgtgccaataaagctttatttacaaaaataggcagcagactggattcaggctgagggtggtagtttgccgacccctgttgtagatgagtaaaccgaggcccagagaggtaaagtaactgagccaggactgcacagctagtgtgtgaccaagccagcctggtgggtcagcctcatggagaagaaaaggctcaagcttcaaaaagggaaatgcacggaggcttcattgggccatttgcagccaggccccacgcacacagctcagggccctgcttcgccagctccacctgtttcgaggctcccagtaggttgcccctgcgggcggcactgtgtcttggctgctggcctggagaagggcagccaaacaggccggcagtggacatctgagggtgaccagctgtttaaaaagaaaactcaccggcatgtataggcacacattaagcacacacgttttggagtaaaaggccctggggttggatctcggatctgcagctttccagctgtgcggcctcatttctctgggcctcaatgttcacacctataacatggggaaatcctgcaagaacacagcccatgatggggagtcgtctccatctcctactcacgacaacgaccagcacagaacgggggctccataaatctctgtcaataactgaattctttctggggtgctgaggattctatggctcaatgtgtgtgaagcactgctgagcaccgagcttggggtgcagtgatcactcagggaacgccatcatcccctcggcgcatccgcataatcaccatcagcattccatgcactgcccaggtctggaagcacaggcctccatgccacggcggccgcctgggtggtggcaccaaagccgatcttacttccctcctttggcacattaagtagacagttctgggtcttcttgacaccacggatgccccctcctggtgttgacagcacccagactttgctccagggaaccaccattcccagatctgtggtttgagtgggaccgaacccatccccagctccaggccaggtcttcataggctgaaacccaactgcacatccacacccaccagaagagcagcaagttaatggatgggtgagaaatcaaatagagccattgagtcttgaggagacattttctggagcttctgaaaaagataatgcttcccccttccttaggattcccagcagggaaacacaagcccaggggtggcactgcccccctgcagccctaagggaagactgagctgctcccaggacctcacaggggaggctgagcgtaaggccagccctgagggaaagcagggaatgggtctccagacaaactgctggatcaagcctctcctgaagtcatcccccttttgttccagaagccaatcattgtccttcattaagtcagtttgatatgggcactgtgtcatttggttttcaaagacacttaactattacagcttgtgtgtgttttcttttttttttttgagacggagtctcactctcgcccaggctggagtgcagtggcctgctctcggctcactgcaagctctgcctcccggattcacgccattctcctgcctcagcctctcgagtagctgggactacaggcgcccgctaccacgcccagctaattatttgtattttagtagagaccgggtttcaccgtgttagccaggatggtctcgatctcctgacctcgtgatccacccgcctcggcgtcccaaagtgctaggattacaggcgtgagccaccgcacccggccgcttgtgtgtgttttctacctcttctagatctaacatgttatgattgatataaacaacaggagcgactgacaaagttaccatgtgatcttggaatttcaacatgcctgtcttgcttagctgggagttccacagggtcagggaatgactcctcttggggccaccagtgcccagaagtatgcctagaactgctctgtctgaagggacaggtccctcttccatggcacacactctgtgtgtaacagagcacacgtgtgaccaaactgacctggagaaagggcctgaccacatccatatcccaagttctgaggccggatagtgcctgcaggggctgagaccaggggagaggctcaagccagccttctctggtggaccctgactcagtcctctgtgcagggcagctgcgcctcccagaaggcagaggcctcttggagagtgagccttgcggtcacagcgcctttcgggggctcccgccacttgccctcagtggcggctgagacctgggggagtccaggcaaatccctgaggaggccccacatgcaaggccagaagtgtctggatggtgtggccggcacccttaccctccagaccagcaaacgaagcccaggcagggagaggggccttgtagttttctgtggctgctgtaatgaattttcacacactcagcagcttaaaacaaccaacatttctctcatagttccagaggccagcagtgtctgcagtgcccgctctctcccagcttctggtggtttcgggcgaccttcggctcttctcagctggtccatgtgca

SEQ ID NO: 29 - DNA, 1325 bp, Homo sapiens
gcagtagcagcgagcagcagagtccgcacgctccggcgaggggcagaagagcgcgagggagcgcggggcagcagaagcgagagccgagcgcggacccagccaggacccacagccctccccagctgcccaggaagagccccagccatggaacaccagctcctgtgctgcgaagtggaaaccatccgccgcgcgtaccccgatgccaacctcctcaacgaccgggtgctgcgggccatgctgaaggcggaggagacctgcgcgccctcggtgtcctacttcaaatgtgtgcagaaggaggtcctgccgtccatgcggaagatcgtcgccacctggatgctggaggtctgcgaggaacagaagtgcgaggaggaggtcttcccgctggccatgaactacctggaccgcttcctgtcgctggagcccgtgaaaaagagccgcctgcagctgctgggggccacttgcatgttcgtggcctctaagatgaaggagaccatccccctgacggccgagaagctgtgcatctacaccgacggctccatccggcccgaggagctgctgcaaatggagctgctcctggtgaacaagctcaagtggaacctggccgcaatgaccccgcacgatttcattgaacacttcctctccaaaatgccagaggcggaggagaacaaacagatcatccgcaaacacgcgcagaccttcgttgcctcttgtgccacagatgtgaagttcatttccaatccgccctccatggtggcagcggggagcgtggtggccgcagtgcaaggcctgaacctgaggagccccaacaacttcctgtcctactaccgcctcacacgcttcctctccagagtgatcaagtgtgacccagactgcctccgggcctgccaggagcagatcgaagccctgctggagtcaagcctgcgccaggcccagcagaacatggaccccaaggccgccgaggaggaggaagaggaggaggaggaggtggacctggcttgcacacccaccgacgtgcgggacgtggacatctgaggggcccaggcaggcgggcgccaccgccacccgcagcgagggcggagccggccccaggtgctccacatgacagtccctcctctccggagcattttgataccagaagggaaagcttcattctccttgttgttggttgttttttcctttgctctttcccccttccatctctgacttaagcaaaagaaaaagattacccaaaaactgtctttaaaagagagagagagaaaaaaaaaaaaaaaaaaaaaaaaaaaaaaaaaaaaaaaaaaaaaaaaaaaaaaaaaaaaaaaaaaaaa

SEQ ID NO: 30 - DNA, 888 bp, Homo sapiens
atggaacaccagctcctgtgctgcgaagtggaaaccatccgccgcgcgtaccccgatgccaacctcctcaacgaccgggtgctgcgggccatgctgaaggcggaggagacctgcgcgccctcggtgtcctacttcaaatgtgtgcagaaggaggtcctgccgtccatgcggaagatcgtcgccacctggatgctggaggtctgcgaggaacagaagtgcgaggaggaggtcttcccgctggccatgaactacctggaccgcttcctgtcgctggagcccgtgaaaaagagccgcctgcagctgctgggggccacttgcatgttcgtggcctctaagatgaaggagaccatccccctgacggccgagaagctgtgcatctacaccgacggctccatccggcccgaggagctgctgcaaatggagctgctcctggtgaacaagctcaagtggaacctggccgcaatgaccccgcacgatttcattgaacacttcctctccaaaatgccagaggcggaggagaacaaacagatcatccgcaaacacgcgcagaccttcgttgcctcttgtgccacagatgtgaagttcatttccaatccgccctccatggtggcagcggggagcgtggtggccgcagtgcaaggcctgaacctgaggagccccaacaacttcctgtcctactaccgcctcacacgcttcctctccagagtgatcaagtgtgacccagactgcctccgggcctgccaggagcagatcgaagccctgctggagtcaagcctgcgccaggcccagcagaacatggaccccaaggccgccgaggaggaggaagaggaggaggaggaggtggacctggcttgcacacccaccgacgtgcgggacgtggacatctga

SEQ ID NO: 31 - DNA, 26042 bp, Mus musculus
  misc_feature (1)..(71): "n" at positions 1 through 71 can be any base.
  misc_feature (6720)..(6747): "n" at positions 6720 through 6747 can be any base.
  misc_feature (9707)..(10000): "n" at positions 9707 through 10000 can be any base.
nnnnnnnnnnnnnnnnnnnnnnnnnnnnnnnnnnnnnnnnnnnnnnnnnnnnnnnnnnnnnnnnnnnnnnntgcttctgcctcccgagggctgggataaaggcgtatactaccacatacatcccaaaatacatataaaaattaatagagctagttgagaagtctctcctctcgtgatagtctctgatttggggatgacacctttcttgaatatttgtatcaacctatttgctgcagtgtaggtgaaggctagcccagtgtgtagatgaagtctagcccagtgtgtaaatgaaggctagcctggtgtgtaggtgaaggctagccctgtgtgtaggtgatagaattgaacttttacttgaagagtgaaagtgatttaaacaatgaggaagcggtaatgctttactcctcacagaaagtccagaggtagcctcaggactggttcagtagcttagcagtgtcactcaggcgagggattcattcagataatccactaggcccctttcttcattgcagagatggcagaggtggccccagcatcatagtagagtggttacgggcatagctttgtggtagcatttttctgtgatccctttggttgggaagctgaggcaagaacattgccagcctaggctacatggtgagaatctggtcaggcagggcacacagcagagtcctgtctgagaagggtcaaaacaaaacaaaagcgcagggcatataaaacagaccttgtttgctagagcgtttgcctagttgcccaccctgtaggaagccctgggttccctccctagcagctcacgagctgagcatagtgctacacactatagtgttccaccattcctgcactggggaggtagaggcaagaagatcaggagttccaggcccaatcaagtttaagtctagcctgaggtccatgattccctgcctctaagagagatttgaggttatcctcaactgtacatcacatgagaggctagcttgggctacgtgagccactatctgaagaaaaaaagagctaggaagatagctcagtgagatggttcagcaagtaaaaatgcatggtggacaagcttaaaaacctctgctccggggctggagagatggctcagtgagtaagagcactgactgctcttccgaaggtcctgagttcaaatcccagcaaccacatggtggctcacaaccacccgtaatgagatctgacgccctcttccacacaataaataaatctttacaaataaacaaacaaacaaaaacccctctgcttggtcctggatcctactgtggaagatgagggacacaccaggaggttgtccacaggtgcaaacacacacatatgcacacccaatgtaattggaacatttcaaatatatctgagcatggtggtaaagtgcctttaatcccagcactcaggaggcaaaggcggggcgatctgtgtgagtttgaggctagcctggtctacatagtgagttccaggacagccagggctacacagcagtgaggccctgtctacaaataaatagacagacagataaataaataagcgataaagtataacagatcagttacacagtaaggcgtataacagatccagtagtgttacacagtaaggcctgactgatagatagaccggcatacagaatgataaaatataatggggcttgtaagatgacacagcaggtagaggtgcttgctgccaagatcttcagaacctatgtaatgaaaaaagagaactaactctctcaagttgtctgctgacttctacgtacatatgcatggcatacacacgcatgcggaaacacatacacatttaaaatgaaataaaccagttataatggggagctagctatagctcagtaggtagagtgcctgtgtaacctgtaggataccctgggttcagtccacagcattgtataaactggtcaaaagatgatcatggttgtaatcctcgaattcaggagatggagttaaagagaagttggatgccgtcttcatctacaaagtgagtaagaggctagcctgggctgcatgagaccttatctgaaatatagtaatggatattgctatctcagttttgcagtaggcacaaggttgtatattcctgccgtctcagagcctcagagacagaaacaggatggacataagtttagaccagacgtattcactgtgaattctaggccaggtagacctagcaagagttgccttagaaacatcaacaaaacagcagcagcagcttttcatgaaacagattccagtctgatgtacacacacatatcaaaccgagcggctatttgttcaattcttttttgttgttgttgttgttgttgtttgttttttgtttttttgagacagggtttctctgtgtagccctggctgacctggaacacactttgtagaccaggtaggcctcgaactcagaaatccacctgcctctgcctcccaagtgctgggattaaaggcgtgcaccaccacgcccggctctatttgttcaattcttgagcatgaggctagctctatcaggagagttctgacctagaggggcatgggacttgtcatttcagagtgtggcagcctccttctgagtaccaggtacctggattgcttagtggcttgttctatcggaagctattgtacctgcccacagcaaggtggaagtgtctaagaactgaaccgatcctgagtctgcctacagaagccttcaaccaatggcagctgagaatgtggagacaaacatcttgcctcattgtgcctcagctacaatcatgatacagacagttgtaagctgccatgtggttgtgggaatcgaacctgggtcctctggaagagtagtcagtgctcttaactgctgagccatctctcgagcccttgcccagccttttttcttaaaattgtatttttaaaatttattttctgtacacaggtgtgtgagtgtgaacatgtggatcctaggggttgaaatcaatttgccggggtttgtatggtgccttctcaccagctttagagtttcttgattactagggaaaccttcctggaagcaggatgctactcagtattttgatcactcataagacatttcattgtgaagtggaaagaaaaccttcgtatgttgttttgtcttgtttgtttaatattatattctacagaacattatatacagatgtcataaggacaataaggacatagtttattatttatttacttatttttgagaaagggtctcactaagtagccctgcctggcctggaactcactatgtagtctaggttggacttgaactcacagagagccacccacctctgcttctggaatgcagggactaaagccatgagctaccatgcctagccagattgtagttttgtttgtttttgttttgtttttcaagacagggtttctctgggtagctttggctaccctagaactcactctgtagcccaggctagccccaaactcacagaggtccatccatctctgcctcctgagtgctgggattaaaggcatgcatcatcacaccagctgagtctttttttgttaggaaaatctccaagttgtctatccttgagctttgtggtattcttttcctgagactgggtctcatgtagcccaggctggcttcaaactcagcggatagctgaagatgctcttgagcttaaaactcagcttctttattttctttatttacttacttttattttgaggcagagtttctctggtgtagccctggctgacctaggactctatttgtagcccaggctggccttgatctcacagagatctgcctgcctctgtctcctgagtgctgggctgaaaggtgtgtactgttgcaccaggctagcggcttttttttttaaaaaaaagatttattttatttatgtatatgagcacattgttgctgacacaccagaagagggcatcagatccagttatagtctgctgtgagccaccatgtggttgctgggaattgaactcatgacctctagaagagcagacagtgctcttaaccattgagccatctctcttcagcatggcctttttttcttttcctctttctttttcttttcttttcttttcttttctttttctttttctttttcttttctttttaaaggcttaataactattcttttttttcttttcttttggagacaaggtctcatttttagcttaagttggccaggaattcactccatagcctaggctgaccttgaacttggggagattctcaaattgggattccaggtctgtgctaccaggcccagcttatacaattgtgtttatttctcaatttaaaaaaaatccatttttattttatgcgctggggtattttgcctgcatgtatttatgtgtacacgcatgcctggtgcctgcggaggccagaatgagcctcagagcccctagaaataaagttacaaatagctgcacaggtgctgggaagtgaacctggggcctctgcagatagcagcaactgcttttaatcgcagaacactctttctagcctttaatttctcaattgaggtaaatgttattaaaagttataaaaatgggccataaagggtatgtgttcttggcatacaagaagcccagggttcagcctcagccactattattatgttgatagttgtaaatacccatacacgaggacaaatttggcttttacaaagccaagccataatcagttggacagtggtggcgcatgcctttaatcccagcacttgggaggcagaggcaggcagatttttgagttcgaggccagcctggtctacagagtgagttccaggaaagccacggactacacagagaaaccctgtctcaagaaaacaaaacaaacatccataatcacaactcaactacctgggcacccacccccctgcatccctgcctcccctgcccctccacacacacactgtggctctggggattgaacctagggactaaatgaattccgaataagtgctttcccagtgagctacctccagctcagagaagagtgtgtgagagagtggagagggtaattgttagtatataagtaacctttttgcttttgcttttttttttttttttttttgaggccgaatctcactattcagtagtccaggctgtccttgaacctgcagcaatcctcctgcctcaggaggatgaatgttacgattacaggtgtgggctaccacaattggtttagaaactaccacatttgcatgttccctttgccccggataccgtgcaagatactttaggccctttggtcatcaaaacatcccggtagggtacggactttgttattacccaactggatgaaaagaaaaacagacacgagagaaccagtaggtttcaaactcactccagagtggcctcattccggtgttgtgtccaccttcctatttaggggtggtatctcctcatcttaatcccctacctggtttctctctctctctctctctctctctctctctctctctctctctctctctctcacacctcacacacacacacacacacacacacacacacacacacacacacacagtgggtctgagagtaagggtgaggtgaaggccctcacctgtcactctgttccccttctgggtctcagttggagagattccaatgataaagaggtgagggagtggtaggaggaaggacgctcagagtccttcatcctctggcctttccttagggcttgtgacaattacattccagctgtcctctaatttaccatttcattgagtaactttgtaattggatgcacctggcttgaagcactttgatttattccccctggttatggggagtgtgagctgggctggctctttctttccctgtctctttgtctctctcctcctccactcccctctcctcctcctcctcctcctcctcctccttcttcttcttcttattctctctctctctctctctctctctctctctctcccaccgctcttgcttgtttgtttgttttttggtagttgtttgttttgttgttgttgttttgtttttgaggcagtctcacctagcccaggctggccctgaatggctgcccaccttgcttccaccttctaagtgttgagattcccagtgtgtgtgtgactcctccaagttttgcccagttttttatgcagtgctgggaattgaacttagagcttcttgcatcttagcctaacactaccaactgagcctcattctcagccccttttttgttgctttgttctgttcttcgaagggcagtgatggtgaagccggataagcagacctctctggagttctcccggggaggcctcctgctccctcagcaaccacccttcatgtagctggccagctccttggccctgaaggcccaggacagtggggctgttgaccagttatccaagaaaccttctaggactcaactgtctctctctctgggtgccctttctcagtaggtcaatgaggaatagatcaatatacatccttgggacagcacaagaggcaatggaatgaagtggtcaagagttggtactgactgctgctttcagatctctgtggctcagcaccgcccctgcgcctttgagttctaactcagtgtgcttaattttttgtttccttcattctgtcttccaaattcttgagcatgtttgccccggcactctgggatttcaccctgtttgttattctgaagacactctcatccttttctattcccatcggtgcatatttccatttatcggtgttagattgtgaatgtcagctcagaagnnnnnnnnnnnnnnnnnnnnnnnnnnnncctttctttatataaggatgatgacgtaatcacaggtaaagataggagctgaaccaagtggattctgggaatatggtggctgttgtcttggcaacaggtgtttggggtcctgcctatgtgatgtcacgggttttggaggtcctgataccaacagtctctctctctctctctctctctctgtctctctccccccgcctctttccgccaccaccttgccactctctctcctaataaacctcaggtggaactgtttggcctggtgcagtccttctgaagctgacattcaccaaacagttggcaacaggaggtcctgatactaacacaaaaggcaaggctttctctcctcctcagttcatctctcttcctggaagctttcttccctgtttgtttgtttgtttcccaaactctaataaaatggtcttcaagcttattaaaacaaaaagaagccatgggggttagaaaggtagctcaatggtagagcgtacctacctaatatgaccagcatcgatttctcctgatgtccacccatgcaagggcatcaactctggagctaaaccagactgcagcctgcttttaccaactccgagctatgtgacctctccgtggtcacttagccatccatggtgagtattagcacccagcccctattacacagggcaaaaataatatactttctgtaaggctgttgtgaagataaaatgatttattacctctcagatatgttcagttcttggacatggtatgtgtacatgaagacctgttactgttgttggtactcacagccagttgttgtgtccagaggatacacagctacgcgggactttatctctgcccttcaggacaggaagtttggtggtgcattcctgtaatctcaatatttgagaggaagaggcagtaggattgttgcaagctgggggctattctggtctacctagagtcagagctacatagagtcaggtctataaatgtcagagctacatagtgagaacccgtgtcataaaactaacagaatgttagtgtgggtaaggcatgcaattgggaggtaaaagcaggaagatcagatccagcctcagttatatactaaattcaaagctagcctgggtgccgtaagacccttgtctcaaaaagtgtcccctccctcattcgttaagtgtaaagcttgatgtataaacatggtggtacgaatttgtaatcccagcacttgggaaactgaggcacgaagctggagaattcgaggtcagctataaaataagacaaactgtttcaacgaggagagaaaccactggggcagtgaccttctgtgactgaagcaatcccatcatgcctccttcctgtatgaaaagccatccccatatgtggattctgaccccttgctcagcgcaagactagtgtgtagaccagtgtgtagactagtgtgtagaccagtgcatagtccagtgtgtagactagtgtgtagatggatctcactgcttatatattgtcctgtgctttcctggggctcacttgggctgagcagagagagcagtgtcttagtggtgggctttcttctttctttccctcctttcctctttcctgccttccttattacatccttttttcccttgatttttgtttttgagacatagtctcatgatattagctcctcctgacctagaactcttatttagactaggctggctttgaactcaaagaaatctgcttgcctctgtcttcaaagtgctgggattaaaggggtgctctgtcatgcctgtcttccttccttccttccttccttccttccttccttccttccttccttgttatttgagtcatctgacatgggtctggctggcctggaattctccatgggctattatcatttggtttgcttggttttgtgataaaatcttatatagcccaggctgctcctgaactcattaggaagcagacagtgaccttaatcttctgatcgtttctgggttctgcagtgctggggattgagccctgggctctgagcatgctaagcaagagctctaccacctgagatatatctgcagcccaccccctgccaccgtgtgtgtgtgtgtgtgtgtgtgtgtgtgtgtgtgtgtgtgtgtgtgtgtggagagagagagagagagagagagagagactctaggcaggccttgaattgtctgtatagtggatagtggatcctggtgttaagccaacacttccctgggtctgagattactggcttgctccaccacagccagcaccaaatggctttttatatgctgattttgaccaacactgctcacacctccgttggtgcaacgcagtgtcccattcagcagacctgagaaactgcatttcttcttttgctttttattttcgttgtgtatgtgcatgaaggtgtgtgcgcacatgctacatacagccttggtgtagaagtcagaggacagcttatgggagttgctctcttctcttccatcatgtgggtcccagggatcacactcaggttgccagacttgatgccaggatagtttaccctctgagccattgaatcggacagaaactacatgctcccagatgctgctgcagatctgcgcaattcgttaaagtagacgagattctaagtcaagtttcccgacggaccaacaatgagatctttgcagctactattgtgcctcagtatcatggtctgcaaaataaagcccaactcgaggccattcctagaagccactttagggtaggagtgacccaactatgtacaaagttatgaccacattccctagagcaatgaaatatgacgtatacacgaaggaataacttttggcgcctagttctttcctgggtggctagaatcgcgacggggcccattgatggggaagagggcacccttccagaaagttctctctaccctcttggtcagaagggacccgagggcccggaagcgtgcgggccggagcccagcggaccaatggggctgcggggagggnnnnnnnnnnnnnnnnnnnnnnnnnnnnnnnnnnnnnnnnnnnnnnnnnnnnnnnnnnnnnnnnnnnnnnnnnnnnnnnnnnnnnnnnnnnnnnnnnnnnnnnnnnnnnnnnnnnnnnnnnnnnnnnnnnnnnnnnnnnnnnnnnnnnnnnnnnnnnnnnnnnnnnnnnnnnnnnnnnnnnnnnnnnnnnnnnnnnnnnnnnnnnnnnnnnnnnnnnnnnnnnnnnnnnnnnnnnnnnnnnnnnnnnnnnnnnnnnnnnnnnnnnnnnnnnnnnnnnnnnnnnnnnnnnnnnnnccatcgcaggatggagctgctgtgttgcgagggcacccggcacgcgccccgggccgggcccgacccgcggctgcttggggaccagcgtgtcctgcagagtttactccgcctggaggagcgctacgtgccgcgagcctcctacttccagtgcgtgcaaaaggagatcaagccgcacatgcggaagatgctggcatactggatgctggaggtaaggcccgaacgggtcccctctcctcaccccacccccacccccggctctgggacaaattgaactttccctgtcggatctttgcgatcccgaccacaatctgcaagatgctttggcggcccagactactggggcctggccttttcacacaggcgccctaagcagctgcctgcgttctgtccctttcctttccccaatcctgatcggcttcttctgtgatttccagtcacttggcactgtaactaaacttcactttgggtcgggaaagcgggctaagggccactctttccccagtggctttcctcggtgtctcctgcttccttcttcacccggtgctctctggagggcgcgtttggaaaaccctggcctcggccgccttagccccagaactggttcctgtgtctatcgcggggttctggcgggggaaactggtgggtgggggtggcgcaggctcggttccggtccacagggaaatgaaaagtgcgggagaccgcggcaggagttccctcccttccccctgggagtgtgtgtgcagtgggtggcggtaatgagggtaaggtcccaattctctctaggtgacccttccgtcccccttccgctcgccgtgggggaggggagtctggaatccttcgtgagcatgggcttctcttttacaccccctactccggggtggggaagagaccatgcagaggaagtgggggggtcaccttggggagggcacatcctcctcggttattgatacttgtcgctctaagtttatcccttctcggtttattttttgcttcgcattccactctccctccaccccccacccccacttctccacgctgccgtgtttcacttggtccttccctagcaatgactcgtgcgccctccctcaggtgtgtgaggagcagcgctgcgaggaggatgtcttccctctggctatgaactacctggatcgctacctgtcctgcgtccccacccgaaaggcgcaattgcagcttctaggtaccgtctgcctgttgctggcctccaagctgcgcgaaaccacgcccctgactattgagaagctttgcatctatacggaccaggctgtggctccatggcagttgcgggtgcgtgcggaaatcctcccccccccccgcccctccaccaaacatacgatcgccctatgtactagtaaaagaaaagccaagctcactccctcacccaccaaccctcccttcgcccctggctggtattttgggacaaaggccttgtagtgtggtcgtggtgcttcggttgcaagcttaaaactaaatgaatccctttcctctggccgcagtggggttccactcctaactcgccccccccccccaatagcaacaagtccaattgcgggtctatacaccagtactttgcctctgggtttacacagccaccgtgagttatttattggcagcagcagggcatgtctgcacacccccaccggagtggaatgtgcttcacgtgggggagggggctgccttgcatgagcctttatccccgtgtggactttgtgatggaaaagcctcccggagctgattaaagccaggccctgctcgctggaaggaagcgctgaggtgttttcatccctttccctcctatccccgaagacaccgctcttttctaaaccctccctttcttgtcttccttctgaaaaactcgagcagctgctctgggcccgtggaagagtttctccctttgctgctcagccaaaggccagagccgagacagacagggagctgagctgcagctgcttccgatgtgataatgatgccggtcccctggccctcccactcagaccaagggctttcataaccctgtggggagctgctgtcactcctgtggtttgggaagtggctccttggggcctcttgctgggaacttgggctgggctcctccaggcggggcaaaaaaaaaaaaaaaaaaaaaaaaaaaaatcggttgggttctgccctgccccggaggagtctagggaggaggtggatctgcttggatctggaagggagcttgaacgtcatctcccacagggtctgggggagagggtgggtgagctggcacctccctccaccttgttctgtggctggccaagccttctctgaccctgagaggagtctctgggccccatctcctagggaggagggcagcaggcagactcctgtgattggctggctgggaagctagggtactggggcccctgactgctgtgagtcggggaactggattcctcttcctgtcaagcagctctcacggatgggaggcctgagttgggaatccgggaggccccacagctctttgtgatgaatctagtttccagagccagggagcacgatgtttttgagggattgaggctgggaggtaggagacttactctttgtgaagagattaagggtggtctacatggctgtgtgtgaggggagtttttcagaataggcaaagccctccttctcctgctcgaggccctgagctgagagtggcctgcggtcagagttgtgagggactccaagaactccagcagtctaaatccacacagcagagcagaggccccagaaaggaggggaaaatccgaccagagcgccttgaaggcagggatgggttgctgctgccagctcctctgatcttggggtagggctggggtttttcatgtcatctggatacaggggagcgtgcccacctagtgaggactcccacactcctggttgccattggggtgcccctttagaggctggatgctatttggttattaggatagagcccagggtgcaagcttcaagcttccttgccttacttctggctctagtccaggctgtttctgtggggttctgtaagaagcctggggctgacacctaggtcatgggacaaagaagagggacagctgtcactgggggggtcctggaagatactgggtggggctgacatttctacctcagtgaggagtcaaacccatgagttccttcctgagataaaacaatgaagaaatcctcctgtgtgcaactcggaagtgcagctcgggccagggctaggaacttcatatgagtagactgaggttggggctcctagcctcctcctaagacctctgaatggttatgtaggcttggacaggtttctcaggggtcatctggattcatcctgtttggcttggatgcccttgtctggagacaggacccacccgtgatgtcccacaaaggggggtgtgggttgggttgggcaacctcctctttgaggaaccttaggagtggcttcatgctcattttgtttaagagacctggatgcgatgttggggaagaagagatttccgaagcctgtggaatttagagttggtctgtttcaactcacgcccgcctcagactcatgggaggattaagagggattaattcaggtcgttctagcacctagtaaccatcaatagatgcttaagtgtacggccctagttcttccctgccccaaacccgtcatcccgcggcagcagcccctgaagccagaggcagaactgtgacccttctgtcaaattctcggccccctcggccgactgctgactccatgttccttccctaacccccaggagtgggaggtgctggtcctggggaagctcaagtgggacctggctgccgtgattgcgcacgacttcctggccttgattctgcaccgcctgtctctgcccagtgaccggcaggctttggtcaaaaagcatgcccagacctttttggccctctgtgctacaggtaagagccaacctgggggaaattgtggggttttttgggaaggatacgtagtaacagccaggagatggtttcagtactcagacctgtgtacagtgatctgggaatactgaataaaagttacttgcctaaggtcttcatagcagggttttggatattttgttgttcctggtgccaggtacaccttgggtagatggaaagtttgttgtttgctcatatctcagaggaggtcgggctgtggtctggtgggtcagtgatagggtgcattcctcagtcagattgccaacactgtgagcacacaccaaccaaaccccctcctccctaggatctaccttgtccccttggctcagtgtcaccccattcaccactgggggttcccaggatgcagcctggtgtgttgtaagatggctccctttcttttcccagattacacctttgcgatgtatcctccatccatgatcgccacaggcagcattggggcagccgtgctaggcctaggcgcctgctctatgtctgcggatgagctcacagagttgctggccgggatcacaggcactgaagtggtaagtctcagcccctcgccccccttcacaaaattaaaaaaaaaaaaaaaaaagctgttcctctgaatctccagcagagggcaccatccacccgggcccccaactatgattgtacgcccttgcctgcttctctggccttttatctctggctccagtctggagaggagtgggtggggtgaaggacacttggcatgtagatacccttctcttgacatctcttgacaagtgctgtgtctcggacaggggtgggggacttggtgtcagatggagggttgctctcacacccttgccacatcctcttgccagtttctgagaactaaagacctgattcctgggctgggctgtggcctaacctccccagacttcccagtgcacagggggtggcctttccacctgcttgctgtcagtgctgtgagggagagagagaggcccaaggatgaatgaccttgtttttttttttttttctaggactgcctgcgagcctgccaggaacagatcgaagctgccctcagggagagcctcagggaagctgctcagacagcccccagcccagtgcccaaagccccccggggctctagcagccaggggcccagtcagaccagcactcccacagatgtcacagccattcacctgtagcttgagacaggccctctcaggccaccaagcagaggaggggcccctgccaccccctccctgcctctagaacaatccatgctatatctgaagcccgaggggggctctccttccccctcacaaagcccaaggggccaggtcctgcctatccccacagtgtgcactaaggggttgcatggtcatgaggggcgtcttcatggccagtcagctcctcttccttcccactcaaccagcttggctgtcctgggccatgatggtcagagaaatacaaacaggtaaaatccacacaccagcatttcttttgagtccctcttctgtccggggctccaaccttctcagttgccaaaacgccccagtaccttccaaaggtgttggcccttgcaggctccttcgggcatcccgatagaagcttatgaggagctgccctagatggcctctgtgtaatccgtactccagctgctcttagagggaacagcctaggctttggccagagcaagaacccatacactgttgctttgcttgctgcttagcttctgtgattgtggggtcttaagggtgccgtggtcattttaatttattgctttgaatacaactgtaagagggtacagtgaggcctgtaccccacaagtggtggtaaccctggcggttgctctttccctcccttcttcccctctgctactgctttgtggcccaggagctgctacagcctgggatgggggtcacgccttcctctcctcacccctccacctcatcttcatcagagcagggttaggttgggatggatcgatgccgtggaggtgacagagctatctggagagagggcaagccctagggtcacaggtctttcctcgggccacaaggtttgggctggtggcccatttctatcatgctgccttaataaagatttcggaataaaggtggctcttgtgatccctggggttgtgggagctggggggcaccaggcagctgtcttaggcagagcacttttcctgggaagggttagaaaggtgccgcctaggcagcatggcctgctttccttgtggacgaattacagcgctaaggagcagccagcattacccagagggctcatcgggagacagggctggacccttacacagaaccctaagattcatacgacatcaggcatggtgcttccttagcacactcagggcagacagaggaagagggctagcctgtgctacatagtgcagaactttggctcagcgacagcactggctactcctgagagcctggactcaattcccagcagttaaccattttaaactccagtctcagggatctgatgctgaggcacaaagctcagaatgtattaaaaaaacaaaaccggatgaatggggttagggtgtggctggaagcacttcccctagcagggaggcaggcccttcctcagtggtgctgcaaaggagcagccctgcatgggagaggagaggagaggaagagggagggaggaagggagggagagcttgagtgagctcagggagtaatttggttgggttgggctaggtttgttctctttgcttttccctaatgtttacaagatgatctactgtgtaagcaaatatgaactcaacagaccaaaccttctcagatatacaaactggattgttatagacacacgttttcaaaagtgaacgtgatacagcaaggtgacttcaagtcagtcagctgtgatgcaatggtctaagggtttttgttgttgtttttggtgaggtagtgtttcacagcagtggctggcctcaaacttacagatccatggttggctgctactaaaatttcatacagattttctcaggccattaaaataatacaaagattgtaagcctagccctcaaaaagttgaaccatcaggcaggtgggtggccaagttcaaggtcagcctggtctacagagtgagttccaggacaggcagggatacacagggaaaccctgtcttaaaaaaccaaaaccaaaaccaaaaccaaaccagacagtattctttgctcattagttatgcagacacaggaacctgacctggcgtctcagccagcctaaagctctggttgcttgatagctaggaagaaatcccattttttcctgattctgttgtgtcactgtcccctagcaagggcctgcaatatagtcttccctgacagtgaaccactgccacttttccaacagacacctttccaacatggcagcagaatctggcatccctagagtcggccctgactgtacgtcatggtaggagtcaggggcgcgtgtgcatacatttcctgtgaagaacaaaggaagcaagagtctagagacacaactttgaagaataaggtggggtgaggtttctgtgggaagtaagaacccgctcttctgagctggggacagggaggagccagcagtgactcccacctctcccgtgggtgacaggggagagaggcagggacctccagggaccaaaacacaagagctgcgataaataaatgcctgttttctccgcaccccagcgagcttacacagtatctggagagagcagaccttataccaactgccaggtgggttgtggggtcgctgaaccgaactgaggtaactccggttagcttccagaagtgagcagggaccaaagcctaaaatggcagagaaagccaaccagatgcagtcctccctgcccaggattaggccacggcagccatagtagcccttcagtgtcttgacctaggtctttaactataccagctggggtcctggggtggtcctgcgccccctgggccaacacaggtgactgttctcattccatggtgacaccaccatcctccacgtctctggggacagcgctctgaagctcacgcctgatctcaggggacagctgcgggtggggctgcagccgaagcagctccaggagggcctccttctgctctgtggccaggtcagccttatagcgctgcgctagtgtcagcaggcactggtgccagaggacaggcagctggcgcttttccgtccggaaggccagaaagtggaagaccagagcgtcgagcacgcggtagggcaatgcgtacttcttatccagcagcaggcgcaggaagatgctgttggcaccgctgtattccatttctgcgatcttcagcatggccgcactggaagggaaggtggagtcacaggaattaggccacacctatgggagtcctcttcttacactgagccttacttcagtgttcccaagggggccaccacaggctgctcacctgttgattactatgctcctgagagtttctaccatctccatccatctgccccacccacacctctgcctctggctcggagagcaagcaatccctgtgtttaactacagatcatgtccaaatgtctcacgatccgcacattttagcacactttcttcctagatgcccatttacacacgcagtcattcaattatactagctaccaggaccctggcccctgctcttgaagacctactattctgttggagtaatcatacacccactgacataaacggctagactcgaggtaatcatagctcattctccattcgcaccctcacgaccaagttccggcctctctatcacacggctcctctctgaccatcctcctccacctccccaccactacctggagtgcagcacggggatggagcacttggtgatgatgctgcccacgatgatggcttcacggagggtacaggtgccggactcacacagtgggatcaggattcctaggcagagtcagatgcagtggcttttagaccggggtgagggaaatgaggcgcagcccccagcagccccaggcatcaaggacccccaatgatctgccaagtaagagccccaccccctcctttctcccctgcttctgctctacctttgaaccaggctccaggcttgaacagggccttcttgagcgccatgtagaggtgaaagttgagtcgtttgtattcagcaatgtcatctcgcactcggggaagcaggacaaggttgtagaagcgctgagccatgcgctccttcaagttagaggcaaaaatcctagcagggtaggagtttccaagttaccagagagcctgaccctggccctttaagaatcatcgcggatggtgcattcgagaggttttatagtcagacacggggacagcgtgttttatagtcagagctgtagcatgggagtgaaagctcttcccactgaagagtaccacaggacttggtcatgaaaaacctggtgagatggctcagtgggtaggagcacccgactgctcttctgaaggtcaggagttcaaatcccagcaaccacatggtggctcacaaccatctgtaacaagatctgacgccctcttctggagtgtctgaagacagctacagtgtacttacatataaaaaataataaatctttaaaaaaaaaaaaagaaaaacgaaagagcagggggctggagagatggctcagcggttaagagcacggcctgctgttccagaggccttgagttcaatccccagcaaccacacagtggctcatagacatctataatgagatctgatgtcctcttctggcccgtaggcatatatgtagacagaatactgtatagataataaataaatcctaaaataataataataataataataaaataaaaaccaatagactatagtttcccctctaaaaaactaaaagccaaaaacccataagactgaaagtgactgagttcaaggccagcctggtctacagagtgagttccaggacagccagggctacacagagaaaccctgtctcaaaaaaaaacaacaataacaacaacaacaaaaaaaaaagactgaaagtgagaatatggaaaatgacatacaagaaaatggaatctaaagtcaaacttgaatatgcagtcacacctgaaaataggtttaaaatccccagaaagaacaaagttaagggagcagcaggagcgagtccaagggaggcccatgggcaactgaacagctctggcaggcaaagcccgcaccccccacagcccacaacctggcccatcaatgatacctggtggcttgatacatggcggctgcagtccaggcctcaggctcagtgacatagaggatctgctcccagttggacagtgcagggatgaccttaaaagccttgggcagtttcccactgcggtacttacataacacctggggtgagagaagcaaaatcgccaactgtgctggggtcctggccctgttgctcactcatctccagaaccatctagaaagcctcgttctccgggtgaccggagtttagtagacttccagggtcaataagagacagtgcaagaacctgagcctatcagctctcccccaatcctgttctgatcgccatggcttatttggtgggggccatggatgagagcccaccccgagtcaggatatcccagcacacacaccacttagctcttacctcccggactcctcggtaaacttccaggacccggggatccagctgaggcatagggaagcccgatacctctgacatgacagtctccacctctgtctgcttctccgtcaacttctccatgatgatatcagccagggtgcgcctatggagacacgggaaaaagagaggtggaaagaattggggtcactttccatgaaactgtaacgtcccctcaacctgttttttatctttgttgttgttatttgacacaggggttttatgtctagctttgcctgtcttagaactggctctgtagacaaggctgacctcagactcagagatccacttgtttctgcctcctttgtgctgggattaatggtatgcctggctctgtttattaaaaaagaaaggcagtagtggtggtgtaagcctttaatcccaacacttgggaggcaggcagatctttgtgagttgaaaggtcagcatggtcttcatagggagatctaggccagacagcaagccccgtctcagaggggaaaaagaaagtcacaaaacatccccaaacaaaacaagaatgcttcacaaacttgcatgtcctccttgcatgggggccacgtccctgtcactgttctaattttagtgtacgggaagctggaagcgagcaatgtataattcccctggacgctgacaaatctcgatcccgctgggatgcacagcctcagttcccctctatgtccatttagccgcctcaaagtgctgcagagcacgggccctggatgtctctgcatctgacgcagagccagagtggtggggacgttaggcccttaggccctgaagtcagctccggctcttctggtccttgtatgatcctgggcccgtcacttgactcctctaagcctcagtttcctcatctgtaaactggggaagtaaaaggacccccctggacagtcagctgaagggtaaaatctaagactgcagcaggcccgactctcagccagagccagcaggtcctgagggctgtttacttcaagctcacctcccactgctcacacaacggggagcaacttctgagtgcagagtggagctctgtgccaggcagcgctggtgcacacctttcatcccagcgctcagaaggcagcggcaggcagagttttgtgagttcaaggccagcctatcctactcacccagcacttgcctagcaaggatgagacctgggttctggcttccagcacaaggggaaaaagtttctctgcagtctttttctgtgccgagcagcactgaatctgacactttccagacttgtgtcctgtggtctgcatgacactggtggcaggtgcttttattcccccgcactgcccaggccggggaatcgagactcagggccaaccaacaactctcctaagccctaagactttctcagggaaagggtaaattttagtctttcgacttctagtttgggtgcttcgcagcgtcttcaatgtgccttaagtgacaaggcctgattgctgtgttcccaaagacccttagcctggtttctgaagatgccagcagccactgctcaagagtgcccacggtccccctttccaccatgttgtcacttccgtatagcaactgcagaaaacattctgctaagtttgtcagatcaagagccactgggtatgaggtgctgcccgagagcctttggggggcacatcacaccccatgaccattctcagagctgtcagacaccttcaggggacagggttctcctgtgttctctgaacccaagctgctcatcaccgtactattaatgatagtggtgtactacaccccactctgaagaataaactggttgagcccctttgccctaagcccagtcctctcaatgaggccagatccatctgaatggaaccaagaatctgaccacaggcagcctaaataactgcatgtttagaagtagcatttataacacatgggggtacgtttgtggttctacccagaggtagttttaacccctctgggaacattttgtcagagatagctgctattggccccaacactgtaactgagatggaaaaccctgagttaaagactaagctatgggctggcgagatggctcagcaggtaagagcactgactgctcttccgaagatgctgggttcaaatcccagcagccacatggtggctcacacccacccgtaatgagatttggtgccctcttctggtgcgtctgaagccagctacagtgtacttatgtatagtaaataaatctttgggccagagcgagtggggttggccagaatgagtagaagtcctaaaattcaattcccaacaaccatatgatggctcataaccatttgtacagctacagtgtactcacatacataaataaattaatcttaaaaaaaaataagactaagctatgagagtaacgtaccaagaataaacactactaaacggatccccagctatcacaaggaaccggtaatccagaggttccagatcagatgggcaaaggggaatccgggtcactcccgttcaggggccactcttggcaatggtcagaccaacagctgtggtctggatgaactttctaccaggacccactggtccaacctttaagccttacctcacgggaggattcttgttcatgaacatttcaatggcacgctcatcttcagggtccacgatcacctctgcctggtggtccaccccggccattttggctgccttctccagggtaggccactcctcatcctcctcatctgatccatcctgtggcaatcccggccctacaagataatcccagccgcaggggcttgtgagtcagttccccattccacgtacagcacacccagggagcaggagggacacctgcagagggactatccttttgtccccagagacttggaatcttgatagaaaatacagcacacgaagcgagagatgataaggccagtaaagactggatgacatgtcccctcagtgaatggatgacatgtcccccctcaatgaccaagaaggatccattctatactacacacatgtaacctggtctgtccagatgacctcaaggaataggtactgttgctatacccagttcaaaccggggcagaagagttgatgtgcccacagtaggtaggcactgtgggtcctgacttcccactatgttgcttgcacagtggaactgcatcatgtgctgaaactaaaaccatggtggaggcagtgtgcacctcaggcacttggatgagtacagaggctgaggaggctctggatgggcagtctgggagcaagagcatgctccacgtcctggaaagtaatgctgttagagtgttgggcactaaggagccagaaaggaaacggaaagccaacctggaaggctctaaggctgggcagtggcattcggactctgatcaaccaacacatttaagttactggcttaggtagtcgaggatgacttgggagttccttgttctcgcgcctccactttccaaacacgcaccacagtgctgaaggctgagcttctgatgttgggttaatcccgtgtgttccatgtaaaggctgcctgtgtactattcacatgttaatctttgttccagcagagagctgagtacagtcggcattggtttttttttttaatgaagcatcacctgtctcagtgttgtggaaacttcttctccatcaccttctgattggtttaatcaaaagctgagtggcccatagcagggctggaaaggataggcgggacttctgggcagagataggaactctgggaaagaaatcagatgtgaggggactcaacagccagacacagaggaagaaacacgtgctgttactgaagagcagtaacgagccccgtggttgaatgtagactagtataaagcaattatgttgtatcagcgagttcggaacaaggcagctaaggccaagctttcataactaataagaggtctctgtgtcctcacttgggtgataggtgggttgagccattcctgccacatcctgaggtcctgaccatggagtcttggctgggtacttcctgagtgctgggattaaagtcatgtgccaatacaccgggctgacttttgaaataccgcacatagctggcaaggcagttgggaaagagtctaataaaccaaagtagttgaattattaccatagcaacagatcagttgctatggaagtggactaagggtatattatatagagctccagagagtacacagagcatacccagtgagagccaaggttgtttgttttaggtttattttacttttaatgtttgagtgctgactgcacgtatgtctgtgcacaagtgtgcctggtgtctaatgacatcagaagatggcatttgatcccttgcaaatggagttacagacagctatagcctgccatatgaatgccagaaaccaaacttgggttttctgcaagaacaagtgttctgaagagctgaggaccaactcttgagagttttcctctgttctctacacacatcatgccacgcacatgcacacaaaatacatgttaaacaaaggaagacaagagctatgaaatacgacgtagggaaaagagagaaaatcaggagacagtcactgacatttgtgtggtgttttgttgttgtgatcatttgctttttgtatatgagtgaaccctgcatcatggaagtgactcttgggagctgatgaccttgtttttgaaacaggatttgactgggacctggggatagctgattaggctagactggttgcccagtaggcccaagagatctgtcttctacactgtagctcagaaactacaagctgctgtgagtggaagtcagggctcatgctctctcaaagcatggacctcaccagctgtgagcattatcttatcctgtccctagcttgtggtcagacctgaaacagagacagaccagacaggacgccatcaatctctagctgctgaatggaccacagaggtcacagaattcaaagcacgatgtttccacagtgatccaggggagagaccctggtagcttaatcagggagtgtctcaggtgaatggaaagtggtctggctctgaaatactctaaagacaacatcaccaggatttactttgaagtgagaaagaggaagcctggactctgactggagcagtggagctaatgtgctaacaacctccaagtagcaaacagagagcaagtttgggaaggaagtcacaacttctgttttagatgcaatcttcttcttttatttttttttttccttctccgagacagggcttctctaggtagccttggctgtcctggaactcactttgtagaccaggctgtccttgaactcagaaatccacctgcctctgccttgtaagtgctgggattaaaggcgtgcgccaccactgccctgcttggacgcaatcttactagagttagatactagtattcaacttggagatgtcaggtagaccactggatataaagatgtgagctttcttggacgaactctgagggagaaaaaactggaagtagctgtcaaacaaatggcctcaaagtgaaattccctgac

SEQ ID NO: 32 - DNA, 1899 bp, Mus musculus
agcgccagcgccagacccgcccgcaccccgcgctctccctcacgcgcgtcgcttctcctaggactcgctaacccgcactcttgctctcacccgtgagccatcgcaggatggagctgctgtgttgcgagggcacccggcacgcgccccgggccgggcccgacccgcggctgcttggggaccagcgtgtcctgcagagtttactccgcctggaggagcgctacgtgccgcgagcctcctacttccagtgcgtgcaaaaggagatcaagccgcacatgcggaagatgctggcatactggatgctggaggtgtgtgaggagcagcgctgcgaggaggatgtcttccctctggctatgaactacctggatcgctacctgtcctgcgtccccacccgaaaggcgcaattgcagcttctaggtaccgtctgcctgttgctggcctccaagctgcgcgaaaccacgcccctgactattgagaagctttgcatctatacggaccaggctgtggctccatggcagttgcgggagtgggaggtgctggtcctggggaagctcaagtgggacctggctgccgtgattgcgcacgacttcctggccttgattctgcaccgcctgtctctgcccagtgaccggcaggctttggtcaaaaagcatgcccagacctttttggccctctgtgctacagattacacctttgcgatgtatcctccatccatgatcgccacaggcagcattggggcagccgtgctaggcctaggcgcctgctctatgtctgcggatgagctcacagagttgctggccgggatcacaggcactgaagtggactgcctgcgagcctgccaggaacagatcgaagctgccctcagggagagcctcagggaagctgctcagacagcccccagcccagtgcccaaagccccccggggctctagcagccaggggcccagtcagaccagcactcccacagatgtcacagccattcacctgtagcttgagacaggccctctcaggccaccaagcagaggaggggcccctgccaccccctccctgcctctagaacaatccatgctatatctgaagcccgaggggggctctccttccccctcacaaagcccaaggggccaggtcctgcctatccccacagtgtgcactaaggggttgcatggtcatgaggggcgtcttcatggccagtcagctcctcttccttcccactcaaccagcttggctgtcctgggccatgatggtcagagaaatacaaacaggtaaaatccacacaccagcatttcttttgagtccctcttctgtccggggctccaaccttctcagttgccaaaacgccccagtaccttccaaaggtgttggcccttgcaggctccttcgggcatcccgatagaagcttatgaggagctgccctagatggcctctgtgtaatccgtactccagctgctcttagagggaacagcctaggctttggccagagcaagaacccatacactgttgctttgcttgctgcttagcttctgtgattgtggggtcttaagggtgccgtggtcattttaatttattgctttgaatacaactgtaagagggtacagtgaggcctgtaccccacaagtggtggtaaccctggcggttgctctttccctcccttcttcccctctgctactgctttgtggcccaggagctgctacagcctgggatgggggtcacgccttcctctcctcacccctccacctcatcttcatcagagcagggttaggttgggatggatcgatgccgtggaggtgacagagctatctggagagagggcaagccctagggtcacaggtctttcctcgggccacaaggtttgggctggtggcccatttctatcatgctgccttaataaagatttcggaataaa

SEQ ID NO: 33 - DNA, 879 bp, Mus musculus
atggagctgctgtgttgcgagggcacccggcacgcgccccgggccgggcccgacccgcggctgcttggggaccagcgtgtcctgcagagtttactccgcctggaggagcgctacgtgccgcgagcctcctacttccagtgcgtgcaaaaggagatcaagccgcacatgcggaagatgctggcatactggatgctggaggtgtgtgaggagcagcgctgcgaggaggatgtcttccctctggctatgaactacctggatcgctacctgtcctgcgtccccacccgaaaggcgcaattgcagcttctaggtaccgtctgcctgttgctggcctccaagctgcgcgaaaccacgcccctgactattgagaagctttgcatctatacggaccaggctgtggctccatggcagttgcgggagtgggaggtgctggtcctggggaagctcaagtgggacctggctgccgtgattgcgcacgacttcctggccttgattctgcaccgcctgtctctgcccagtgaccggcaggctttggtcaaaaagcatgcccagacctttttggccctctgtgctacagattacacctttgcgatgtatcctccatccatgatcgccacaggcagcattggggcagccgtgctaggcctaggcgcctgctctatgtctgcggatgagctcacagagttgctggccgggatcacaggcactgaagtggactgcctgcgagcctgccaggaacagatcgaagctgccctcagggagagcctcagggaagctgctcagacagcccccagcccagtgcccaaagccccccggggctctagcagccaggggcccagtcagaccagcactcccacagatgtcacagccattcacctgtag

SEQ ID NO: 34 - DNA, 26874 bp, Homo sapiens
  misc_feature (25082)..(25101): "n" at positions 25082 through 25101 can be any base.
cacaccactgcactccagcctgggcgacagagcgagactctgtctcagaaaataaaaaaaataaaaaataagtgggatctattattattactacctaatagtattattactattattgctctggtgtgctatcaggggtgttgtgccacactggggacatactactcctgaccccccacctaaactttctttggatgccctcttcttcctgcttctctcttcttactcccacttaatctttttttttttttttttgtgtgtgtgtgtgtgtgtgtgtgtgtcgctcaggctggagtgcagtgacatgatctcagctcactgcaagctctgcctcccgggttcacgccattctcctgcctcagcctcccgagtagctgggactacaggcgcctgctaccatgcccggctaattttttgtatatttagtacagacggggtttcaccatattggccaggttggtctcgatctcttgacttcggatccacccaccttggcctcccaaagtgctgggattacaggcgtgagccaccgcgcctggcctactcccacttaatctctaaactcctgcaatcccatttctttcaccatggctgtttcatggaattcaggtgatcagaaccaccaatctccaccagtcccaggacagcccacccttcctgtcacacaaaccaccctgcctacttctgatgggtgttgcaaatgccgaggtaaaagtcttctgtcttcatgacatcttaggattcctgcatcatggaggatcatcatatcatgcactttagactggaagcttaaaagggtggcttctcggcccagcgcagtggctcacgcctgtaatcccagcactttgggaggccgaggcgggcggatcacgaggtcaggagatcaagaccatcctggctaacacggtgaaaccccaactctactaaaaatacaaaaaattagctgggcgtggtggggggcgcctgtagtcccagctactcgggaggctgtggcaggagaatggcgtgaacctgggaggcggagcttgccgtgagctgagatcgcgccactgcactccagcctgggtgacagagagagactccatctcaaaaaaaaaaaaagaaaaaaaaaagggagtcttctcatctctgacccatgtccagcatgtcccagggcttccgaaggcctgcctgatgtatggaaggcacatgataaggcacctgattgttaatgaccacagctatctttattgaccacctactatgagcctgggacagctaaagtacttttcccttattaatcccctcattcaccatatgaaataggagttgttaccatcctccttttgcaaatgagaaggctgggacggaaaagttaagtaaactgcccaggatcacacaatcacacagctggcaaatagcagagctgggcatcaacctaaatccagagctcacttacttaatgactaagccaaactaatgccagtgctatctcctgcctagaatgaggaatgcttgccagccaagaaccgaagacagctctctttttgcaggtatattgctgtagcaggttacccttccacacctgaggccctgtgtgcacctcagtcttacctgtggaacaggaatctcaagcagaatgacagaacaggaaagcctcatttattcagaacccagacagccagaaaaaggaagaaaaagcaaatgcttaaatatataggttgtattcttttttttttttttttaatcttgctctgttgtccaggctggagtgcagtggcgtgatcttggctcactgcaagcttcccgggttcacgccattctcctacctcagcctcccgagtagctgggactacaggcacccgccaccacacctggctatttttttttttttttgatatttttagtaaagacagggtttcatcgtgttagccaggatggtctcaacctcctgaccttgtgatccgcccgcctcagcctcccaaagtgctgggattacaggcttgagccaccacacccggccctgtaggttgtattcttattttatgaggagagacttgacagtttcaggctagtacctgaggtttcttttcccaagcagcttataagctagaaattgcaaactgctttttgtccctcagacctggtatataggcatattatgtgtggcttgcacggttttgttactgtttttcaactcaagtaatatagatattttaggaaatttcttttttttttgttttgagacggagtctcgctctgtcgccgcctcccaaagtgctgggattacaggtgtgagccactgcgcctggcggaaatttcttttcttttgagacacagtttcattctgtcccccgggctggagtgcagtggcacgatctcggctcactgcaacctctgcctcctgggttaaagcgattcttctacctcagcctcttgagtagctgggattacaggcgtgcgtcaccatgcctggctaatttttgtattttcagtagagatggggttccactatgttggccaggctggtcttgaacgcctggcctcgctggtcttgaacgactggcctcaagtgatccactcacctcagcctcccaaagtgctgcgattacaggcatgagccaccacacccagcctttttcttttcttttgtagtaatggggtcttgctgtgctgcctaggctggtcttgaacccctggcctcagtgatcctcccaacttagcctctcaaagtgcagggattgcaggcgtgagccatcatgcccgatctaagaaatattatcttggggaaacagggaatctatggccacactcattactatggtgtagcaaaagtctgaagctaagcagtactttttgagctttggatgggacatgtgctatctactgtgtctggccccaacagctcccttaaccccatgtgagttgccatttatcatgtggtgtatgctggtgtttttcttttttctttttttcttttttttttttttgagatggagtctcgttctgtagtccaggctggagtgcagtggcacgatctcagctcactgcaacctccgcttcccgggtcccggttcaagcaattctcttgccttagcctactgagtagctgggattacaggcacgcgccaccatgcccagctaatttttttgtattttttactagagacggggtttcaccatgttggccaggctggtcttgaactcctgacctagtgatctgcctgcctcggcctcccaaagtgctgggattacaggcgtgagccaccgcgcccagcctggtgtttttcttatatccagtttgttttattcattaactcaaaaaagatttattgagccagacgtggtagtgcacgcctatagtcccagctacttgggaagctgaggtgggaagaccacttgagcctgggagatagaggctgcagtgagtcgttatcatgccactgcttccagcctgggtgacagagtgagaccctgtctcaaaaaaaaaaacaaaaaaaaccaaaaaacttactgaacatctactatgaactggataccatcctgttttggtggtgtggtgtgggagtagacaagctgtaaacagaatatgcaagcaaagtatatgctatactagtgatcagtggtaagcagaaaaataaagcagggaaagagcataagaagtgtcagggctggggagctggcattaaaaatttaggtaggatggccaggaaaggctgtaagaggaatgcaacttttggacttcctgaaggaagtgagggagtgggccatgtggatatccggaggcagaacattccaggcagatggaacagcacgtgcaaagagaacatgtctgcccggtgtgttccatgaaccgtgtggccagagcagagtgagggagagtagtgggaaatggggtgggagtatagatgctgcagggtctttggcagtcactccaaatgaaatggggagcctctgagagtgatgggttgagactagactggagggccaagggtgggtcagggagacccggcaggaggctaccactgtaatccaggtaagagatgatgcaactcggaccggggggtagaagtggaaatcgagaaaagaaggggattggagatgtatttttgacgtagaatcaaccagaagtgggtcgcaggttggatgtgggggaccagtaaggtcaaggaagaactgagtttggacagaggaagtaacagaggaggaaaaaaagagtagattttggaaatattttgaaattattaatagctcctctgtgatctgctgatcagagtgtggggattgtgtgggatttgagaaagaggagtcaggaatgacaccaagtgtttggcctgagccattggaaggatggagttgccattttctgagataagcctgtaggaagagcgggttttttggggaaagattaggatatcagttttggagaagttgagtttaactggcctatcggacatccttgtggtgttgccaagaaggcagcctccagtataaaatggaaactaaaaacaggtcagttcacaccaactctgatttggtagtgctgcctaaagtgctgtgttgggattttaaatgcccatccaggctgtttcttttcttttctttttttttttttgagacggagtcttgctctgttgcccaggctggagtgcagtggcgtgatctcagctcactgcaacctctacctggtgggttcaagcgattctccttcctcagcctcctgagtagctgggattacaggcatgcgccaccatgcccagctaattttttttgtatttttagtagagatggggtttcaccatgttggttaggctggtctcgatctcctgacctcgtgatctgcccgcctcggcctcccaaagtgctgggattacaggtgtgagccactgcacccagccaatttttgtatttttagtaaagatggggttttgccatgttggccaggctggtcttgaactcctgacttcaggtgatccgcccacctcggcctcccaaagtgctgggattacaggtgtgagccaccgcgcccagccgaagagtgctcaatttttactgataggaatggacaagcaaagagttttaaagattaatgtgaaatattgtacaaatattacagatgctcataatagtgacctggaatactgtaagcaccgagatagctccttgattctcaaagaaaaaagctaaattatatgtagtttggtttactgcttttttttttttttttttttttttttttttgagacaggtctctgttgcccagggtggagtgcagtagtgcgatctgggctcactgcaatctccatctcccaggctcaaacaattctcctgcctcagcctcctgagtagctgggactacaggcgtgcgccactgcgttcggctaatttttatattttttttttggtagagatggggttttactgtgttggccaggcggtctcaaactcctggcctcaagtgatctgcctgcccctgcctcccaacgtgctaggattacaggtgtgagccaccgtgcccggccaactttgtgcttttaagtcccgcaatcacaactaactttttaaaaaagggttcaccacgtgccagccactcttctatgtattttaaacaaatcaacccatttcctcctcacaaccactctgtgggggggtactactgttatcaccatttttagaaaaggaaactgaggcacagagaggtggtttaacttagccaaattcacacagtgagggagtggagtggcagaggggtgtggctccaggccctggagggtcctctccatacgctagaccatgtgtttaccgttagaagccaggtcttcaggatttgctagagatgcaattctaggagtagggctcttgctgctcaaacttttgcttttcttagaggggttatggatgcatgttcataacagaaagggtactccttgagaaagggaataataataatcatttcagaaactactatctctgaatgcttgctttgtgccaggcacaggtaagacattttctgcttgtttaattttcagaacatcattatagggctattatattatccccactggataaaagaggaagcagagaggttccagtaattctctcaaagtcataagctgtggagccaggtttgaactgaaagcagtctctgactccagaaccctgtttagcacccctgttctcagccccatggctcgcttggctctccccagcatctcaatgggtctgaaggtaactaagccatggcatgtggactgtggggtgatgggcctcacccatcaccttgttcagcctctcacttctcagatgcggacttttttttttggagacagagtttcgctcttgttgccctggctagagtgcaatggcacgatctcggctcactgcagcctctggctccagggttcaagtgattctcctgctcagcctccggagtagctgggattacaggcatccaccaccacacctggctaattttttgtatttttagtagagacaaggttttaccatgttggccaggctggtctcgaactcctgacttcaggtgatccacccgtcttggcatcccaaagtgctgggattacaggcgtgagccaccgtgcctggcccagatgggggtattttgatgatgaagaggaagagaaagaaaatgtatctttcctccttggggtttcttatttggcctgtgacattccattcccacccctcctccaatttgccattttattgactttttctaactggatgtacctgggtagaaactcctcatactattggccctggtcattgctttgtctttagttttccttttagaaaaacaaaaacaaaaacaagaaaaacaagaggagcctctatttctttgaggtggaggtaactggtgaacttgtgctggtcctgcattgagctcacctgcctccccagtggccagtccttggccctgaaagtcagggatgatctagctctaggcatggctattccatccaggggtgaggcagaagtatctctcctaaagtcctgctcaccaggagctcccgtccccatactacaggttcacatccagctttcaggactagtcagtctatgtggccctccctcaattaataaatcagcaactaatttgccaggtgcggtggtttgtgcctgtaatcccagcactttaggaagctgaggcaggcagatcacttgaggtcaggagttcgagaccagcctggccaacatggtgaaatcccgtatctactgaaaatacaaaaattagccgggcatggtggtatgcacccgtaatcccagctactcaggaagctgaggcaggagaatcacttgaaaccaggaggcagaggttgcagtaagctgcactccagcctggtgacaagagcaaaactttgtgtcaaaaaaacaaagaaaaccaaaaaacaaagaaaaacacaaaaaacccttctatttgttaaaaaaaaaaaaatccaccgtgaaccaaaaattagtaaaaacaatgaactaaaattttgtttttgcaaaatgtatgataacaaaatgttaaggaaggtcatgtgccgttatggttcactgcagccttgaactcctgggctcaagcgatcctcctgcttcggtctccctagtagctgggactacaggcttgtgccaccgcacccagcttattttttttttttattttttgtagagataggagtcttgctttgttgtccaggctggtcttcaactcctagcttccagtgatcctcctgcctcagcctcccaaagtgctgggctgatgggacatttttatacatagtgccatgttactataaatgagaagttttaaaaatactgattttaaaaattaatttatgtcaagaatttttataaccaaagttaaaaaaccaaacaaaaaatatgaaaagggttaatatctttgagaggtgatgagaacttataagtcaataagagaaaacaaacatccctataaatgaataagctaaggacatgaatgggtaatgtacataagaaatgtaaatgtctagtaatatgccaaaatagatttattattactaataagccactttcactctctagttggcagagttgttttgaaaaatagatatgtaatgatggtggaaaagattggtttaactattcagcaggaaaatttggcaattagaagtgtatcaaaagccttagaatgtttcataaccttagattgggaaattccacttctagaaattaattcacttctagaaataatcatgagtgtgcacaaagatattaccacaaaaatattttacagtattatgtctaatagagaagaactagaaataatttaaatttccaccaatacaggtttgccaaaatacattttgtacattcacctaatggtatattatgtccctattacaaattatgtcctagaatatttaatagcatggaaaagtgttaacagtatttttttaatgaaaaaagcttacaaaacagtttgtgatgattccatttaaaatgtgtgtttattcatagaacaaagattagaaaaataaacattgatatattaaagggttatttcatggcaaattgcaaatgattatttcctttttttgtggcttatttgtatttttgaagttttctacaatgtaaaagaatattttatgatatgaaaactacaatacaatttataatataagaaagaataattcggccgggaacggtggctcacgcctgtaatcccagcacttttggaggccgagaccggcggatcacgaggtcaggggttcaagactagcctggccaacatagtgaaaccccatctctacgaaaaatacaaaaattagtcaggcatggtggtgcgtgcctgtagtcccagctactcgggaattgcttgaacccgggaggtggaggttgcagtgagcccagatcgcaccactgcactccagcttgagcaacagagtgagacttcgtctcaaaaaaaaaaaaaaaaaaaaaaagaataattaacagaaaatggttagacacttccttagtgtctcctaagtcaggaggaccccagtagggcagggatcctcatggcctcctcccatttggagcattattggaggtctttttcggcctcttcgtcaagtggaatctagcttccggtaaaactacaaagtaaccaaaagtttgggaggtggaagaaatgcaaccggtagatctcacagagtctgtgcaagaaactgattcaatgagaatctagtttctccgtccacagtttctccaaacagaaactaaggccgactttaggggcttgtccaaacctaggcaagcaacttaacaaggtgaggccatgactccatggcctttccgttctgttatatgctgacttagactaaagctctcatactttaaagtgcacagaaatctagttaaaatgcagattctgattcaggttaggggtgggcctgagagtctgcatttctaaccagctcccaggcgatgaccacgcacgggacaggtctgggatcacagtttaactagcaatggtgtagaacacagaatctgcagcaagaaggccagcttcccaatcctagctctgccacggaccaactgaatgacagttgcctcggtttccgagttttcgtgaagatgtagtgagtcattacatcgtgaggctttcgagcagcgttcactaagaactagctctgacattatttatcgcattccttagagcaagcagccggtgaagtagggtttgacgaatgaataagtgaatgaatgacctttggagaaaaattgtttcctgggtgactagagtccgagaagcaaaatgggagggcccgtgggtgggtaggaggcccacctcctagaaagttctctgcacccggtggtccagagggcctggagtgcccggaagccggccggcttgcgctcagcggcccaatggggccgcgggagggaggggagagcgctcagccaaccctttccgtccggggcgccgcagccccgcccctcggagcgttgcgacgtccgagcattccacggttgctacatcgtcgcgaggggcggggcgcctgtcagggaagcggcgcgcgcgcgcgggcggcgggcgggctggggatccgccgcgcagtgccagcgccagcgccagacccgcgccccgcgctctccggcccgtcgcctgccttgggactcgcgagcccgcactcccgccctgcctgttcgctgcccgagtatggagctgctgtgttgcgaaggcacccggcacgcgccccgggccgggccggacccgcggctgctgggggaccagcgtgtcctgcagagcctgctccgcctggaggagcgctacgtaccccgcgcctcctacttccagtgcgtgcagcgggagatcaagccgcacatgcggaagatgctggcttactggatgctggaggtaccgcccggacgcgtccccctcccccaccgctcccgggtctggacacaccggggccgccctgtcgggacatcccggtccccacagcaatctgcaggatgctccgaggctaagactcccggggcctggcctttcactagggcacccacgccagctgcctcccttgctttcccgagccctaatcggctcctcccgacagtgactgccagtcacttggcaccctaactgtgcctctcttcgggccgagcaaacgggaccaaggacactctctccccttcggcttctcacagcgtctcccgcttccctccgcctcccggccttctccggagagcgcgcctggaaaaccctgggctcggccgcccccgcccgggagccggttcctgtgtctttcgcggggttctggcggggaaggcgatgggggtggcgcgcgccctgttccggccgacagggaaatgaaaagtgcaggaggcagcggcaggagcctcctcccttcccctcgggtgtgtgcagtggtggcggtgatgggggtgaggtcccagctctctggctaccatgggtgacccttgcgtcccacttcccctcgctgtgggggaggggagtctccgtttggaatcctccgtgagcaagggctccttggctttaccactcccccgtcaaggggagaggggaggaggccgcgcagaggaagtggggggcgtcaccttggggagggcgcatcctcctcctttattggtccttgtctctctaagtagcttaccctctctgccgtttttgctccctatcccacctcacttcagcgctcccacccccccgctgctgtgttccccacgctccagacccagcagtgactgtgcgccctcccccaggtatgtgaggagcagcgctgtgaggaggaagtcttccccctggccatgaactacctggatcgctacctgtcttgcgtccccacccgaaaggcgcagttgcagctcctgggtgcggtctgcatgctgctggcctccaagctgcgcgagaccacgcccctgaccatcgaaaaactgtgcatctacaccgaccacgctgtctctccccgccagttgcgggtgcgtgtgtaactccccccacccccgacacgtattgtctccccactttccaggaaaaggaaagcttgagatatcagaggctttctgccccctggagaggaagcaaggggatcaggacctttgggaaaggaattggggtggaacaaacgatggggcattgtggtgtgatggttagtatcactcccgcccaggcttgagctgcaggcaggcattaaaccccctcctcctgacctccaggggatgccactccttcctggtctttcccccagatagcaacaagtcaaattgcatgtctacactcactagtactttgcctctgggtttacgcagccaccatgagttatttattggcagcagaagggcatgcctgcacacccccactggagtaggggagtggaatgtgcttcatgtgggggagggggttttgccttggttgagtctttatcctcatgtggactttgtgatagaaaagcctcccagagccaattaaagccaggccctgattgctttaaggaagggctgatgtatttcatcccaccttctttgcttcctcttatatcccggaagaaacagcttcttcctaatccttcctcgtcctcattctgaggaactggagcagctgctttgggcctggtggaaacagctccctcttccccccttagcccaaggcccaagctgagggacagacagggaggtgagctgcatctgcttccgatgtgataatggtgccccctcccctggcccgccctctctgaccaaggtctttcataaccctgtggggagctgctgtcactcctgtggtttgggaagtggctccctgggcctcttgctggaaacttgggctgggctcaggccgggcaggaaagtcaccggttctgtcccgcctcagaaggagcctggggaggaggcgggggagctgctggatctggaagaggttatttaggacatgcagattgtctcctagggaggctgggggagagggtgggtgagctggcaccttcctccaccttgctctgtggcgggccaagtcttctgctgaccctgagaggagtctctgggccccatctcccagggaggagggcagcaagcaggctgctgtgattggctggcagggaagccagggtactggggcccccgactgctgtgagtcgaggaacaggattcctcttcctgccaagtagctcagagatgggagtaggaggccagagttgggaatccaggaggcgccacagctctttgtgatgaatctggtagtttttggcaagtctgaaggtggagctagtttccagggccagagagcaagatgtttttggaggggttggggctggaaggtagaaggggaacttcctttttgtgaaaagatggaggtggtttgtgtgcccacgtatgagggtttttcagtacaggcaaaaagtactcttccctctgcctgagctgggggtggagtgcccaaaagacttcctagaaggtcaaggttggaagggacctctgagaactccagttggtccaaatccgtgtgcagcagaggaggctgaggcccaaggaaggagggcaaggtcctgcctcagcatcgcactgagcagatgagtgtagaacctgggtcttctagctagaccaggttgccttaaaagtcaggaatgtgatggccgctgccacctactgaagctaagcactcccaggggtgtgttctccaccagttaacactgggattctctggttgcctggatatggggaaaggtggccactttccctcaaacacaaccccttgcctccccatagggagagtcccactcccagttgccttccagatgcttccttagaagctgagtcccttctgtttactgctgagttaggagttggctcctgggacatgcactaggggtagcgttgtaatttatctgtctcacttctggctccaggccaggctattttctctggggctctgtgagggtaggggttgatttgagaggctgacacctaagctggggccaagagagagacagctgtggctggggcctggaagaggttgggtggggttgccatttctgcctcaataaggagtcaaacccacaagttccttcctgagataaaacaatgaagaaatcctcatgtgtgcaactcagaaatggggccaggtctgggaacccatgacgagtggactggggtggagctcccagccttctcccgagacctagtactggcaggtaggcttgggtaggtgaggatagggcttgatccctctggaatcatttggagccatcctgtctggcttggcctctacctatcctcctgaaagtcaagtggcatggggcactacgggttccagctaaagggggtggggtggggtgctatacctcaggacccatccctgatatcctaccaaggggatgtggcttgggttgggcaatctcccctttgaggaacctgagaaaaggctctgtggctgtcattggaggagtcatactcccttctgttgattcaagaagtgtggacttggctgggatgcagagttgcaggggaagctagtggtgatctcccctttcacaaatccttggggttgagagagtctttctgcttcatcccagaagagagcccagttcatggtgatgctgtggtatctgctgcttccgtctttcagccctggctggagaaatcctcagagccctgaatgaagtcaggagaaggcctggattattggccccttaaacataaccagacaggattaaaagggataatccatgtaaagcatgttgtcctggcacctagtaaatgatcagtaagtgctcaaagcacatgcctcctcctcttccctgccttgaactccatggtgcccggccttaaaatcagaaacagaactggggtcttgggctttaaaagtttgatgggcttccctgcctgagactttgagacttctgctttgctccctcctcttctcttctccagccactgaccccaccctttccccgctttttcaggactgggaggtgctggtcctagggaagctcaagtgggacctggctgctgtgattgcacatgatttcctggccttcattctgcaccggctctctctgccccgtgaccgacaggccttggtcaaaaagcatgcccagacctttttggccctctgtgctacaggtaagagccctatgcacatttttgccaaattggaaaaatcagaagacttataagggtgagaggtaactgaagattctggtttatactgtcaaaattcctttgtgaaaattataccccctctgagcccccagtctcaatgcagaaaagcaggttataatcagctatatgggatctcagacccctccagtttgtagtggggacactgagggtatagagagaagtgacttgcccaaggtctcacagtgaacaggttgggaacagaaccccagtctcttggccctagttgtgttcccatactagggagtgtcttgtctattcccgggacctatggaaactggcagttggttctgatctctaggaaagatactctttcctgtcttcctcccttgctgatatcttgccccacccactgctggagttttccagcatgtcctctgctctactcatgctgcctggcactttccaaggagtcggaagtccatgctggccgttatccttcaggtttccttctctcatggttccctttcctcctctccaagattatacctttgccatgtacccgccatccatgatcgccacgggcagcattggggctgcagtgcaaggcctgggtgcctgctccatgtccggggatgagctcacagagctgctggcagggatcactggcactgaagtggtgagtgctgggtagctgggcagcagcctctccattcataaagtagtgctatgccctgagcctccagtagagggaaacctccaaccccaacctggtcccaagtcctggtttcacaaccttggggctttgtggctttttatctcctgccttggtctggggaagagcaagtatcttgggtggggtgaagggcactggccctaggggttcttttcttgccaagtggtgtgctggagtgggggtggggggtttggtgtcagatgcagggctgctctcacactcccttgccacatcctcttgctagtttctgagaactaaagagcgattcctggggccgggctgtggcctaacctccccagacttccccatgtgttgggagctgtccttcccctgcacctgctgccagatgctatggggggagtgtttgctcctcactcttctcccatgttcccaggactgcctgcgggcctgtcaggagcagatcgaagctgcactcagggagagcctcagggaagccgctcagaccagctccagcccagcgcccaaagccccccggggctccagcagccaagggcccagccagaccagcactcctacagatgtcacagccatacacctgtagccctggagaggccctctggagtggccactaagcagaggaggggccgctgccacccacctccctgcctccaggaaccacaccacatctaagcctgaaggggcgtctgttcccccttcacaaagcccaagggatctggtcctacccatccccgcagtgtgcactaaggggcccggccagccatgtctgcatttcggtggctagtcaagctcctcctccctgcatctgaccagcagcgcctttcccaactctagctgggggtgggccaggctgatgggacagaattggatacatacaccagcattccttttgaacgccccccccccacccctgggggctctcatgttttcaactgccaaaatgctctagtgccttctaaaggtgttgtcccttctagggttattgcatttggattggggtccctctaaaatttaatgcatgatagacacatatgagggggaatagtctagatggctcctctcagtactttggaggcccctatgtagtccgtgctgacagctgctcctagagggaggggcctaggcctcagccagagaagctataaattcctctttgctttgctttctgctcagcttctcctgtgtgattgacagctttgctgctgaaggctcattttaatttattaattgctttgagcacaactttaagaggacgtaatggggtcctggccatcccacaagtggtggtaaccctggtggttgctgttttcctcccttctgctactggcaaaaggatctttgtggccaaggagctgctatagcctggggtggggtcatgccctcctctcccattgtccctctgccccatcctccagcagggaaaatgcagcagggatgccctggaggtggctgagcccctgtctagagagggaggcaagccctgttgacacaggtctttcctaaggctgcaaggtttaggctggtggcccaggaccatcatcctactgtaataaagatgattgtgaaataaaactggctttggcttcttggattggtgtgtgggtaagtctatttctgcactgtatgaggtaaggaggtggaagtcaatggtctaaagcagggatcattgagccttttctgtaaagggctggatatttaggctttgtggggtacatggtctctgacccaaatatagtcagttctgctttataatgtgacctatgcgttcctaaaaatcactatgccatgcaaaattgcacaataaagaccacaggtctcatgggaaaaatggggcttgaagcacaacactcaaatgagtgacacatttaaaaaaaaaggatagcttggtttttacatatgtcaaatggttgagaaattatatcacaataaatatggccttttatcttgaagacatgcactttgcttttggaagtggacgtcggaagggttgctcaacacaggtggggagatgagtgaggtagctggtacatgtttaggtgtgagttttgtgtactacttaggcttggttcagctagatacagtttcccatattcacctactatttctcgaggatgaaatcacacacaagcaaacatgaagtctgcgttatgatcaaactgttcccaaatatattaaatgggttggaacaaatgcgcaatttcgaaagcaaataacaagggttatagcaggattatacttaaactctgctgttgtagcacaaaaccagccacagaaaacatgtaaatgggtgagcatggctgttccaacaaaactatttatggatgctgaaactggaatttcatgtaattcctacctatcacaaaatactgttttaattttttccccatttaaaaatggaaaaatcattcttagctcatgggccacacaaaaatgggcacttgggctgggtgcagtggctcatgcctgtaatcccagcactttgggaggccgaggcgggtggatcacctgaggtcaggagtttgagaccagcctggccaacctggtgaaaccccttctccaccccgtctctactaaaaatacaaaaattagccaggcgtggtggcacgcacctgtagtcccagctactcaggaggctgaggcaggagaatctcttgaaccatggaggcggaggttgcagcgagccgagatcatgccactgtactccagcctgggcgacagagcgagactccgtctcaaaaaacaaatcaacaaaaaaaggggcacctggccctagtttactagtcactagtctaaagctttcattggctgaaaagccagaaagggagcctgtttgatgctagctctgatctaaccattcttgggcccagccttattctctggccttttttttttttttttgagacagtcttgctccgtggcccaggctggagtgtagtggccccaatcctggatcaccgcaacctccacctcccaggttgaagcgattctcctgcctcagcctcccaagtagctgggattacaagcacacgccaccacacccagctaatttttgtatttttagtagagaaggggtttcaccatgttggccaggctggtctcgaactcctgaactcaggtaatccacctacctcagcctcccaaagtgctgggattacaggcgtgagccaccaagcccagcctctctggcctttcttgactcttatctctgctttccccaaggagttttctcttgtagtcctttcatccactgctgagacacgaccatctttggacaacctgctcctggctgctgtagcctgtgatgggggaaggcagaggatgtgtcccctgggggctaacaaggtgagtgcagcctggagaaacaagcttggagatcaagggaggtgggtcctatataaacaggacaagaatgtcctccgtcctccaaatactaacaggagtaatgcctacctccattgactacaccaaacacagaggttcaataaatatctgtctttgcctttatccacagtgacctgacacaatagccatagaaaaagtactcacaccaagccccagctggggactgggaatgctagcatatggtatctcaagttggctctcagaactaaacagggataagggcctagaatggaagagggaaccagccagaccctcagtccttcctgtcctggactgggagccacagatgtccctgtgatctgtcactgccctgatctgggtcttcagccattaaagctcagtgtcatcttcagtcaccaacgggggtcttggtgtccttccaaacccctttggccaggacagctgactgttttcctcactccacggtgatgggaacatcttccacatcgcgggggactgcactctgaagctcacgcctgatttcgggcgatagctgtggatggggctgcagccggagcagttctaagagggcctctttctggtctgtggccaagtcggccttgtagcgctggaccaaagtcaggaggcactggtgccacagcacaggcagttcacgcttctctgtccggaaccccaggaagtggaagactagggcatccagcacccggtaaggcagtgcatacttcttatccagcagcagtcgcaggaagatgctgttggcaccgctgtattccatctcagcaattttcagcatggccgcactagtgggaaagggaggtggggtagagtaagcagggaaaacattggaagaaggatcctacttctccctctatgctttcccctttttttcttcccctctgctggcccttacactatggtattccccagggaccttctcacctacacaatcatattatactcccttgacctcagtcaccatctctacagggatccacccaaatctctatctctagcatagactgcttgtttcagtaaccaactagagtatggtccaaacatctcaacgtctccaccctaactactttcttcctgtgtttcctactcatttgtttatctatttactgagaacttactttatgccaggcactcgggccctgttgttgcacaacttacattgagggggataatgatacacctactcattggcttaaacaagcacaaacccaaggctttccttagctccttctccactctgcccattcccaagtcctggcaattccactatctggatatccactgaccagcccccttccacccccagcaatactacctggagtgcaacacagggatggagcacttggtgatgatgctacccacaatgatggcttcccggagggtacaagtgccagactcgcacagtggaatcaggatccctagggagagtcaaagggcagccactgtgagcccaggatgagaaaaaggagttacagcaggaagcattcccacccagcccagggacagctagcaatttcccacaccaggcctgctgtgttccccatagaagctccagcccttccctttcttccgtgcctctgggatcccacctttgaaccaggctccaggtttgaaaagggccttcttgagagccatgtagagatggaagttgagtcgtttgtattcagcaacgtcatctcgtactcgagggagcaggacaaggttgtagaagcgctgggccatgcgttccttcaggttagaggcaaaaatcctagtgggagttaagcgggggaagtttccaactcacacgacagtctggacccggcccattaaatatcaccatggatagtgcatacaagaggttttaaagtaaaatatgggacctttctttcagtgggggatgtgtgggagctgtgtgcatgcaacacccatcagcttagagagagaataggaggggcaatgagatatacccaaatgaggagcaccgtttgtctgtgggagagccagagctcgtgcaaactgatggctactcagcatcagttcgattctgctagccctgagcatgcctgggcagtcacagacttctgagggtcctgctacagggttgtatcccagtggctataaaagcctctcccctagaaattcatcacagagggttgtatcccagtagctataaaagcctctcccctagaaattcatcacggagggttcctaactggctaactgggtcttggccccaaaaaatgacacaggaaaagctagaaaaatgatgctataaagtagcacagagagggccctggggcaaagctcaaatgccctggggccagaggcaaggaaagcctgtccgtcccaaactcagcctgcacctataaacccaaggcccccgaacccccagctactctacctggtggcctggtacatggcagctgcagtccaggcctccggctctgtgacgtagaggatttgctcccagttggagagtgcagggatgatcttaaatgccttgggcagttttccactgcggtacttagataatacctagggatgagggaggtaaaacaatcatcgtcatccacatatggcaagcttgctgtgggctaggaacttgtctgggtgcttttaatatattaactcattgcatccccacaataacctataaggaggtgccattattatgctcattttacagatgaccagtgagagttccagtaaccgacccaaggatgccaagtcatttacaggcagagcaggaatctgaacccacacactctgcctcttaggtctgttttctactcccatgacttctttagtatgcgatgcaggcaaaaggcaaaaaagcctgtggcaggagcccacagcccccaaaggggtcttccaccatggctcccctctcagctcttacctcccggacccccctgtacacttctaggacccgggggtccagctggggcatagggaagcccgacacctctgacatgactgtctcaacctctgtctgcttctcagtcagcttctccatgatgatgtcagccagggtgcgcctaagaggggaagtgccaagaggaggggagagagggggcaaggagcactgtggtcactgtccaggaagctccagactccccacagtcccctgtgagcaccgccatactgcgatcctgctgggatatgcagcttagagttctctctctgtgcccattcatccaccacagacagaatcactgcagggtgcaaaggaactgaaagtcattccatttaggacaaagctagcagttgtacggaggttattatgaacctcaactctgaagtcagtctgcccaggttcaaatcctggctcacccactccctggtatgatcttgggcatgttactttacctctctatgcctctgtttcctcatttgtaaaatagggataataacggtacccaccttaaaagattaatggaaggattaaataagttaatgtctgttcattacttggaatggtcagtacacagtaagcgttatctatggaaatatttctaagactgattatattcttttcagcctccttaaacagtattgttgggtgtatcaaacataatcttatcttaatgattcagaattaccatcgccttgagctgtcatataatactagcatcttcagaggctgctgaagtgtatttatttattttttttgagagagagtctacctctgttgcccaggttggcatgcagtggcaccatcatggctcactgcagcctctatctctctggctcaagcgatcttcccgcctcagtctctcgagtagctgggaccacaggaacatagtacaaggcccagctagttttttattcttctgtagagatggggtctccccatgttgcccaggctggtctcacactcctgggctcctgccttggcgtcccaaagtgctaagattacaggtctgggccaccatgcccagactgaaatgtatttaaagctgcttctcagttgggcgcagtggctcacgcttgtaatcccagtactttgggaggctgagggaggtggatcacgtgaggtcaggagtttgagaccagcctggccaacatggtgaaaccctgtctctactaataaaacaaaaattagccaggcgtggtggtacgtgcctgtaatcccagctactcgagaggctgaggttgcagtgagctgagatcatgccactgccctccagcgtgggtgacagagtgagatcctgtcacaaaacaaaacaaaaaacaaactgctcctcttttctgaggtcctactcaatgccaggcactgagtttgggacttttcagtcctagagtcagcgcaacacttataggacacggaaacttatgcagacatgggaactgggcctcaggttaataactcacccaaggcctcacagctgtcaggtgggggtaagagtcaaactcaggtttttggaagtcttgagttaaggtgctttatagtaccttataatgtgcccccaaactaaatggcctctgattgttgaattcatgtggatctaggcttgctttctgaagatgccagctatcatttcttacgactgccaggagttctgattacttcaaggagcttgtctactctatttactacaagctggaaaagcattctgctaaattggtcagcattatcagtgaagtaggagttatgaggtgctgagtgagaacctgagaggctctctggggggacaagcccaagtacatactttatgacatatatttcaactgttaggcatcaatctgggagaggggctcattttcatttcttcattctgcattttcaaataagctgccacagaatttatcagcctccctgtccttttatagtatgattagcaatgagatgcattagcccaaaacagcctaaagtatcagggacaccattatgttaatatcacagggtcagaatgaactggttgaggacccttatcctagactccactcccaagggccaaaatttatgggctcaggagtttgaccacaggcagtctaaatgcctgcatgttttggagctagcatttattatagatgggaataaattagtggtcctgactaggggcagtcttgcctcccagaggacatttggcaatgtctgatgtcatttttggttttcacaactgggggaaggttgctactggagtctagaagtagagatcagagatatctactaaacctcctacactgcacaggacagcctccacacacacacaaaattacccagcccaaaatgtcaataatgctgaggttgaaaaaccttggcttaaatgaagcttaggatatgaagacttgtccaaggaagttgagcttaccgctaaaaaaactaagaataccaaaaccaaatgcaataggatggctctccccagaggtgtaaaaggggcctggaactgtttccctggcaactgggcagttgtacaacaaatggacataaggacacaatgttttttgaggctgggtcattcctactcacagtggtcctttgaggatgggccagttttgtcaaggtggtcccctacagctagcaactccagggccctttccaaaggtagggaatcataagtctgccagggaacttgttttcctgtgggaactttctacaaggactcattatcccaaatccccaggcctacctggcaggagggttcttgttcatgaacatctctatggcacgctcatcctcagggtccacaaccacctctgcatgatggcccgctgctgtcattgtggcagccttctccagggtgggccactcctcgtcctcgtcatctgatccatcctgaggcattcttggacctagaagaggggagactaaatggatgagcacagcaaaaggtagctgagggatttcgtcagtttaactttagccattatgtagtacaggcctcacatgtggttgtgatagacgcaggtatgtgcagtgaaacaaatgcattagctccctgtccccaggggcttgcaatcatgcttgagaaacaaaatgtatatacaggaaacaataagaaaagcaatggccataaataatagttaacataccatactcagttatgtagaaggaacttttttttttttttttgaaatggagtcttgctctgtcacccacactggagtgcagtggctggatctcagctcactgcaagctccgcctcccgggttcatgccattctcctgcctcagcctcccaagcagctgggactacaggcataagccaccagcccggctaattttttgtatttttagtagagttggggtttcaccatgttgaccagaatggtctcgatctcttgacctcgtgatccgcccgccttggcctcccaaaatgctgggattacagggcgtgagccactgttcccggcctgtagaaggaacttctaaacactatacccatgttaactgtttaatccttataaacccaagaagtggcgggcannnnnnnnnnnnnnnnnnnnacggtggctcacgcatgtaatcccagcactttgggaggccgaggcgggcagatcacgaggtcaagagatcgaaaccaccctggtcaacatggtgaaaccccatctctactaaaaatacaaaaattagctgggcgtggtggtgggcgcctgtagtcccagctatttggaaggctgaggcaggagaatcacttgaacccaggaggtggaggttgcagtgagccaaggtcacgccactgcactccagcctggtgacaaagcgagactccgtctcaaaaaatatatataaaattaaaaaaaataaaataaaccttcttatggaacaatggcaaataaataaataaataagaataaacccaagaagtggatactattactatacccagtttcaaatgaggacattgaagcactgagaagttgggtaatttgcccaagacaggtagtctgggtctagactgcattcttcaccactattctacacatattcgggtttgattatatgccacaatgagtagtagagacaacatatgcacttaaaggatgagtggtgaggacagttaggagctggatgggcagtttgggagcagaaggagtgtgttccagacgcagagaaaataaggcttggatataagagtctcctaggcaatagcaagaaataatgctaggtacgtgggaaaggtgaagccagactggagggcctttaaattcaggcagtagagttcagatttcaatccaccagtccatttaaatacatgaagttggctgggcgtggtggctcacgcctgtaatcccaccattttgggagaccaaggcgggtggatcatgagattgggagttcgagaccagcctgactaacagggagaagccccgtctctactaaaaatacaaaattagccgggcttggtggcgcatgcctataatcccagctacttgggaaggctgaggcatgagaatcgcttgaacccgggaggtggaggttgaggtgaggtgagccgagatcgcgccactgcactccagcctgggcaacaacagcaaaactctgtctcaaaaaaataaataaataaataaataaaaataaataggccgggcgcggtggctcacgcctgtaatcccagcacttagagaggccaaggcgggcggatcacgaggtcaggagactgagaccatcctggctaacacggtgaaaccccgtctctactaaaaatacaaaaaattagccgggtgtggtggcgggcgcctgtagtcccagctactcgggaggctgaggcaggagaatggtgtgaacccgggaggcggagcttgcagtgagccaagatcgtgccactgcactccagcctgggcgacagagcgagactccgtcttaaaaaaaaaaaaaaaaatgaagttagtccatttaaataacttctgtttttggaaggctacatgtctgggcatctggaaaggggtctaataatccaagtggggagctataatgctacgtatcaataggtcattaacaacaaaggcagtgtgtgataaacactaaataagggggaacagacattttgtctccacgttccaacggtcccccaaatttgtactttgtaggtggttctccttagtgccagaccctaactccaggtgtctcctgtaagctgctcttggatgactcacaggcacctcaaatctcacccgttatcaactaaactaattttctttccctcctaggtctacactgctaaccatccacagctcagtaaacggcaccatcgtccacccaatgctaagcctgggagg

SEQ ID NO: 35 - DNA, 2042 bp, Homo sapiens
gcgcctgtcagggaagcggcgcgcgcgcgcgggcggcgggcgggctggggatccgccgcgcagtgccagcgccagcgccagacccgcgccccgcgctctccggcccgtcgcctgccttgggactcgcgagcccgcactcccgccctgcctgttcgctgcccgagtatggagctgctgtgttgcgaaggcacccggcacgcgccccgggccgggccggacccgcggctgctgggggaccagcgtgtcctgcagagcctgctccgcctggaggagcgctacgtaccccgcgcctcctacttccagtgcgtgcagcgggagatcaagccgcacatgcggaagatgctggcttactggatgctggaggtatgtgaggagcagcgctgtgaggaggaagtcttccccctggccatgaactacctggatcgctacctgtcttgcgtccccacccgaaaggcgcagttgcagctcctgggtgcggtctgcatgctgctggcctccaagctgcgcgagaccacgcccctgaccatcgaaaaactgtgcatctacaccgaccacgctgtctctccccgccagttgcgggactgggaggtgctggtcctagggaagctcaagtgggacctggctgctgtgattgcacatgatttcctggccttcattctgcaccggctctctctgccccgtgaccgacaggccttggtcaaaaagcatgcccagacctttttggccctctgtgctacagattatacctttgccatgtacccgccatccatgatcgccacgggcagcattggggctgcagtgcaaggcctgggtgcctgctccatgtccggggatgagctcacagagctgctggcagggatcactggcactgaagtggactgcctgcgggcctgtcaggagcagatcgaagctgcactcagggagagcctcagggaagcctctcagaccagctccagcccagcgcccaaagccccccggggctccagcagccaagggcccagccagaccagcactcctacagatgtcacagccatacacctgtagccctggagaggccctctggagtggccactaagcagaggaggggccgctgccacccacctccctgcctccaggaaccacaccacatctaagcctgaaggggcgtctgttcccccttcacaaagcccaagggatctggtcctacccatccccgcagtgtgcactaaggggcccggccagccatgtctgcatttcggtggctagtcaagctcctcctccctgcatctgaccagcagcgcctttcccaactctagctgggggtgggccaggctgatgggacagaattggatacatacaccagcattccttttgaacgccccccccccacccctgggggctctcatgttttcaactgccaaaatgctctagtgccttctaaaggtgttgtcccttctagggttattgcatttggattggggtccctctaaaatttaatgcatgatagacacatatgagggggaatagtctagatggctcctctcagtactttggaggcccctatgtagtccgtgctgacagctgctcctagagggaggggcctaggcctcagccagagaagctataaattcctctttgctttgctttctgctcagcttctcctgtgtgattgacagctttgctgctgaaggctcattttaatttattaattgctttgagcacaactttaagaggacataatgggggcctggccatccacaagtggtggtaaccctggtggttgctgttttcctcccttctgctactggcaaaaggatctttgtggccaaggagctgctatagcctggggtggggtcatgccctcctctcccattgtccctctgccccatcctccagcagggaaaatgcagcagggatgccctggaggtggctgagcccctgtctagagagggaggcaagccctgttgacacaggtctttcctaaggctgcaaggtttaggctggtggcccaggaccatcatcctactgtaataaagatgattgtgaaataaaactggctttgg

SEQ ID NO: 36 - DNA, 879 bp, Homo sapiens
atggagctgctgtgttgcgaaggcacccggcacgcgccccgggccgggccggacccgcggctgctgggggaccagcgtgtcctgcagagcctgctccgcctggaggagcgctacgtaccccgcgcctcctacttccagtgcgtgcagcgggagatcaagccgcacatgcggaagatgctggcttactggatgctggaggtatgtgaggagcagcgctgtgaggaggaagtcttccccctggccatgaactacctggatcgctacctgtcttgcgtccccacccgaaaggcgcagttgcagctcctgggtgcggtctgcatgctgctggcctccaagctgcgcgagaccacgcccctgaccatcgaaaaactgtgcatctacaccgaccacgctgtctctccccgccagttgcgggactgggaggtgctggtcctagggaagctcaagtgggacctggctgctgtgattgcacatgatttcctggccttcattctgcaccggctctctctgccccgtgaccgacaggccttggtcaaaaagcatgcccagacctttttggccctctgtgctacagattatacctttgccatgtacccgccatccatgatcgccacgggcagcattggggctgcagtgcaaggcctgggtgcctgctccatgtccggggatgagctcacagagctgctggcagggatcactggcactgaagtggactgcctgcgggcctgtcaggagcagatcgaagctgcactcagggagagcctcagggaagcctctcagaccagctccagcccagcgcccaaagccccccggggctccagcagccaagggcccagccagaccagcactcctacagatgtcacagccatacacctgtag

SEQ ID NO: 37 - DNA, 63845 bp, Mus musculus
  misc_feature (1)..(1624): "n" at positions 1 through 1624 can be any base.
  misc_feature (18698)..(19219): "n" at positions 18698 through 19219 can be any base.
  misc_feature (45981)..(46111): "n" at positions 45981 through 46111 can be any base.
  misc_feature (58652)..(59151): "n" at positions 58652 through 59151 can be any base.
nnnnnnnnnnnnnnnnnnnnnnnnnnnnnnnnnnnnnnnnnnnnnnnnnnnnnnnnnnnnnnnnnnnnnnnnnnnnnnnnnnnnnnnnnnnnnnnnnnnnnnnnnnnnnnnnnnnnnnnnnnnnnnnnnnnnnnnnnnnnnnnnnnnnnnnnnnnnnnnnnnnnnnnnnnnnnnnnnnnnnnnnnnnnnnnnnnnnnnnnnnnnnnnnnnnnnnnnnnnnnnnnnnnnnnnnnnnnnnnnnnnnnnnnnnnnnnnnnnnnnnnnnnnnnnnnnnnnnnnnnnnnnnnnnnnnnnnnnnnnnnnnnnnnnnnnnnnnnnnnnnnnnnnnnnnnnnnnnnnnnnnnnnnnnnnnnnnnnnnnnnnnnnnnnnnnnnnnnnnnnnnnnnnnnnnnnnnnnnnnnnnnnnnnnnnnnnnnnnnnnnnnnnnnnnnnnnnnnnnnnnnnnnnnnnnnnnnnnnnnnnnnnnnnnnnnnnnnnnnnnnnnnnnnnnnnnnnnnnnnnnnnnnnnnnnnnnnnnnnnnnnnnnnnnnnnnnnnnnnnnnnnnnnnnnnnnnnnnnnnnnnnnnnnnnnnnnnnnnnnnnnnnnnnnnnnnnnnnnnnnnnnnnnnnnnnnnnnnnnnnnnnnnnnnnnnnnnnnnnnnnnnnnnnnnnnnnnnnnnnnnnnnnnnnnnnnnnnnnnnnnnnnnnnnnnnnnnnnnnnnnnnnnnnnnnnnnnnnnnnnnnnnnnnnnnnnnnnnnnnnnnnnnnnnnnnnnnnnnnnnnnnnnnnnnnnnnnnnnnnnnnnnnnnnnnnnnnnnnnnnnnnnnnnnnnnnnnnnnnnnnnnnnnnnnnnnnnnnnnnnnnnnnnnnnnnnnnnnnnnnnnnnnnnnnnnnnnnnnnnnnnnnnnnnnnnnnnnnnnnnnnnnnnnnnnnnnnnnnnnnnnnnnnnnnnnnnnnnnnnnnnnnnnnnnnnnnnnnnnnnnnnnnnnnnnnnnnnnnnnnnnnnnnnnnnnnnnnnnnnnnnnnnnnnnnnnnnnnnnnnnnnnnnnnnnnnnnnnnnnnnnnnnnnnnnnnnnnnnnnnnnnnnnnnnnnnnnnnnnnnnnnnnnnnnnnnnnnnnnnnnnnnnnnnnnnnnnnnnnnnnnnnnnnnnnnnnnnnnnnnnnnnnnnnnnnnnnnnnnnnnnnnnnnnnnnnnnnnnnnnnnnnnnnnnnnnnnnnnnnnnnnnnnnnnnnnnnnnnnnnnnnnnnnnnnnnnnnnnnnnnnnnnnnnnnnnnnnnnnnnnnnnnnnnnnnnnnnnnnnnnnnnnnnnnnnnnnnnnnnnnnnnnnnnnnnnnnnnnnnnnnnnnnnnnnnnnnnnnnnnnnnnnnnnnnnnnnnnnnnnnnnnnnnnnnnnnnnnnnnnnnnnnnnnnnnnnnnnnnnnnnnnnnnnnnnnnnnnnnnnnnnnnnnnnnnnnnnnnnnnnnnnnnnnnnnnnnnnnnnnnnnnnnnnnnnnnnnnnnnnnnnnnnnnnnnnnnnnnnnnnnnnnnnnnnnnnnnnnnnnnnnnnnnnnnnnnnnnnnnnnnnnnnnnnnnnnnnnnnnnnnnnnnnnnnnnnnnnnnnnnnnnnnnnnnnnnnnnnnnnnnnnnnnnnnnnnnnnnnnnnnntggctgccagcaaccaggcccttctggggccagttccctccgggcagatagatcagctggccccaggggtgcaggatccgaggggtcaagcccccagagtggcagctttgtgtgatggaatgaggcttaaactccagttggcaaccttcagtacattcatgggggcagccaccactgtgtgcacacaaacaagcaccactgtgcgcacacaagcaagcacctctgtgtgcacacgagcaagcaccactgtgtgcacacaagccagcaccactgtgtgcacacaagcaagcaccactgtatgcacactagcatcactgtgtgcacacaagccagcaccactgtatgcacacaagccagcaccactgtgtgcacacgagcaccactgtatgcacacaagccagcaccactgtgtgcaaccaagcaagcaccactgtgtacaaacaagcaccactgtgtgcacccaagcaagcaccactgtgtgcacacaagcaagcaccactgtgtgcacacaagcatcactgtgtgcacacaagcaagcaccactgtgtacaaacaagcaccactgtgtgcacacaagcatcactgtgtgcacacaagcaagcaccactgtgtacaaacaagcaccgctctgtgcacacaagcaagcaccactgtgtacaaacaagcaccgctctgtgcacacaagcaagcaccactgtgtgcacacaagcaagcaccactgtgtgcacacaggcacatgtgcatgctgcaccccagctttctcttacccacctccttctgggaccctgaaatctctgtgactgcttggaacatgctaagaggtccatggacaccacccagtcctgtgagtagtaagtacctcctgggctagatatgaccctcacctatagcaagtgtccgcagaaggctgaggtagccacttctagggacccacagctgagttcctgttcagtgccctggtctgtcctgcaaggtaaggacatcaaggataatgaccattagtaatggtggagaaacgaagcatctagtctagttagctgtcacggccaaaaggactcttaattaggccacgttaatctataggaagggtcatagtcaaagagggtaagtgagcatgcagcccaacgacagaaaatcggccagggaccccttggctccccacccacatcctcccagctctcacattctgatggaggacaacaggtagagactaacagcttttctgggccctggactgtctaccttgtctgaagtctacagtgtctgaagtaggtatctgaacttgacccagccctcttcctcgccttcctcctcccactcctgaagaaagcttctcacagaccaaagaagtgatcactggcatcgccaggctcctctggcagctgagaggccgtcacgcttcctccttactgggaatatctgggtcgcagaggcctccgtatgacccatactttcaccccacttactcgtaaggctggattggtgtccccaaatatgtccaatactttgagacggggtgggggtggggcctcatggccatggagattccagatgcagaggagggaactcagtgccacctttggctgtaaggaacagcctcaattgggattaggaaaatacaccatcttgaatcataaacaaacaaacaaacaaacaaataaataaataatcttgaatcacaaacaaacaaacattccaagacgggattctcagggcagttaatgtctcagcagtggctcaagagactcagtttctcccaccctggtcttaagtctctactttggtctcagtcagttgttctcacagcatccaaccaagatataacaataccccaaagcggggaaactggacagcaatttagcggactgctcactcccctaaatactttctagaaatcacaggtccgtcagctgactccccttcgtgtctcctttgagtcggtgtagcccaagcccttgcaaattgactcagactagtcagcatttatctctgagccaggtgggggagaacaaacttggttcctcatgtgcctaaataaagcctctgcctttacatatacttttatatacatatatgtgtatatatatcatcctagtcaggatttctactgctgcacaaaacatcatgaccaagaaacaaatgggggaggaaagggtttatttatcttatacttccacattgctgttcatccccaaaggaagtcaggactggaactcacacagggcaggaagcaggaggcaggagctgatgcagaggccatggagggtgctgcttactggattgcatctcctagcttgctcagcttgctttcttatagaacctgggactgccagcccagggatggcaccccccacagtgggccctcccagccttgatcactaattaagaaaatgccttatagctggatctgatggaggcatttcctcaagggaggctcctttctctgtgagaactccagcttgtgtcaggtggacacaaaaccagccagtacagttacttgcaaccataagtaactccagttccagggatcctgacctctgcaggcatcgagcaggtggatggcatacatgcatacaggcaaaacactcgtacgtgtaaaagaagataaatccaaaatagtaataataataaaaagtaactcaaaagaactttcctcctcactcagctcagctactgccaggaaccatttcagagccagcaggcatcaccactgcaggcgagggaataggcttagagagcataggaaacatgaaacatgcccagggttgtacagtacgaggcagagctgggctctaaggcaaccactcagacagtgtctccctggacaaacaaccgaaatcccataggacagatcctgagaggccagcaatgctaagcagggtttgcccaaggaccgccccccaccacctgtgacagctataaacacctgttccaggatctttgctggtgaagtagcgagggccccagcgactgtccactgaaccatctacttgtgttcagactcttagcccctagagctcatttctggtccaacctcagtttccccacggtggctgctgttggtcatacttgtctgtgaagggatggttgggggcagagatctggagggtgcaaaccaagcatgatgggcaattgtctgccctatatccatggatcagaccaggctactcgatccccccccccttttttttaaatagtgtccccaccagactcttctcccaagagtctggctggctcttaattttgctgtttagaaacatttgattttctgaggtatgcctcttccaggagaaggtaagcctcatagactcagaaccctggggctcaggcatgcttacctgggggttacctgcatatagtccttcttagtgaacaactaactacacaggacacctatgcaaagaacacctgggacctctgtaatggcatgcacatgtgtgcacaccacacacacacacacacacacacacacacagagagagagagagagagagagagagagagagagagagagagagagcgatcattgtggctggaggggctgtcaagtctcagatgcctccaggtgtcagtgacttctggccaggttgctatgttctcatctcaagccatcaggaaaggtgggtgttaccttgaggaaaactgaacccaacactggggtggacaggtctccaggaagcattaaagtgccttaaaataccacacggaacataaacccagggccctctcatctgggatctcaacaccctctctaagtctgtcagcctactctgttcttggtgccagagttctcctgagttcagttggataaagggcagcacacagcacacaggcttaggtgtgccatgtgttaactccatggcagtgttaggggcttctggccagagcctagggtaggggttggccactgatggaggtggagagactctccaaagagatgctgatgtgggagtcctacaaggggcgggggcggggtgggtgggttggcctctgatactaggacatgttagggggagaggagtgcccttgtcacagaaaaaagaagaaagccagtgtttttttgtttgtttgtttgtttgttttttaaccatccaagtcagctttgtgtagtattaatgtctaatgataaggactccctgtgagatagctaagtcccattctcacaccacaattgagggtacattcagggagcagctacctccactggccttcatttcttcttccaaaggaccccttccaaattaccctggggacctgccgctgctgttggaggatcactggaaaaaggggacacctgacatcttcaggtctggcagacctagacctagaaaggatacctgttctgggtggaaggccttggggtatcacaggtccactcccagagatgccaatctgtatcccataagccagtctgctgactgtctctagggcctgcaagtcctcccaggtgactcaggggtgccttgagcctctaagtggagcacacttgatccccaggtaagctccgaaattgcacagtagattaagggaattcactcacaaggatgcctccttagctgagatccccaaagatccaggctgcataggacctgaaggctcactcacttctgctttccagtcagcagcaatgtagcaatgtaggagccaggcagcacagggaaggctctgagctctgggacagacacctgcatctctttgggtgcttggatccccctactctttggcctttctgcaggccacaggcttcgacttctgagtcttcacttaggatgatgaggcctacctgcatgaatagcgtcgtgtctaatttttgtctccgccaacccctccatgatcctcctacttccaaggccacctgctgtctggtctcctagctgtctccaggaaactcacccgaaatcgttcgagaggctcctagagttgttaagggagacccttaaaagctcccttctcctggtcagagaccttggagtctcccgttccttctggtgttcttctgagaatctctgcttcaggtcccttgaccttcgcacctgatgcctccctgctttgcccacagtggtttttctccctccattcctacattaggctaggttggttctgagcccccacccccatcccgcagttcccagagggaacagtcccagcaaaaatacatggaactcagtgcctgagtgggagatttccccctccctcctcacgacagactggcagccgagtgagggcgggtgggggtctagcggccaaattctttgtcttcgaggtgcctcagcaggggtccggtggagcagcgcagaatacacacagccgctgaccgataactcctggagagagcgcacttcaaaaggaacctcccggcagctactgaggtgggggtgggggtccccatctcgggtctgaagtccctgtcagtcacacacagcacgcaggcttccacgtgccacatcttttgctgcaggtcctgggtcccagatgccttcccctccctcaaccaggagaccacccttcctgtccagggcgagcctcatatccaccctcattagctggtttcagagtaaaaataatcctttcccgccatgtgcagcctaccctgatgttgggtgcctatcaagagagaagatgtgtctaggagatactcgtggcaaaggggctccctcactgcctgggcagggtccattcctgcgttgccacccgcaggcaggaggaagaaaattaagcctgtgttgaaggaaggacacctggcaagagagacgaaaggactccggaatcccctcctctggggaactttcaagtgggggggaaatccccacgcaggcttctactctgcggcagcaacatgcgcggccactccccgcttctggtcccctcctcctttccttcttgcacctttgcctgtttgtttcctaccctcagaacagcacctggggctgcctcgggctctggtttgcctgtaagaggcacctgcatacacacagcccttcaagggacgaccagttttagccacaccaggacagcttcccacgtatctcgcaggcagccaacatctcacccaaagccaccaagagcctttgcccccgctctcttgggctggcacctgtggaatcttaaggatctaaatgaccccaagaagccctccagattagctcttgcctccacaccatagcggtgtgttggaggccagagaaagcaacgtccctgttttcagaaacactaattttggactgcccccccccccgccccacgctctgatgcaggactagagatttaatccgcatagatgttcagcggcctatggggagcccccatgggatgagcagcaatcaagatctcagctaaaggctacctagtaacccaaaagcctgtgaagcaagctccttgacagaagcctcagccccggggctttgcattccccgatagtggccaaccccctcctactgccctcccaggtgaatcagaaacggggcctcagaatcagccgtgccccttggggaggaatcttctgggaatgcccggcccccgggggcatttctaggggtgcttatctcagtaccatctaccagctccactagtcttcagcaggtgggggattgcctgctgttccttagccctccccacttctccccttcccctttcaacccccacctcttcctctgtctgggcgttcaccccacccccgcccctgttttccgtctcagtgtctctatccacttgtctctctctatctccccttcctcccctctttcatctctccctctacccccctccagccgaggatcgggctaggaactcgcagaagctgtgacaagcccaggcggctctctcgacccttggtgcccccaggggccagttccttgctctccttacaccagcagaagccatgtgccgagaacagaccagcaggggcagtggatccgagctgtgggcaccagcctgccggatcaaaggctaggaatgtctgctccccgtaggacttccctcagtcccatccacccctaacagcaagaaagcccgccattcctggctaggcaggtttgggtgggctccctctcttcaccgtctacacagttaagtcccaccatggcttctcctttggcttgctttctaggtcccaagccaggagcatttcaagggctgaatgtcttctgtgtccgggtagagaggctgaggtacctaggtaaggggactgaatcctaacaatctaggtatgattgggctcagacttaactcccaaactgtggagaactggtaagaagagtgccccttggaggcctgaacagttccccttgtataagagcttcagtaggtcgtagggtgaatctggtgtctgcacgggacaacgcttaaacaccaatcgccaggttttagtttctcatccgtagaagggtcgggaatataggtcagagacctggacataggggaggtagatgttcctgaagagccctcgcccccaaccactaatagacagagctataccgtgtttcactagtcccaaatgcttccatcctaagatccaagaaactgcaggtactgctgaggtccggccagcacgcctgcaggaggagaaagtgaccgaatcctcccgcaggaaatgcaaacggcggctggtgtcagttgcaggaaatgcaaaggctgcaggaggtcgcgataccaatctgactcttgacaaaagactcaaatgacactagctctgtcccccggcgccgccggctggcagaccttcagagcctcagcggactctcccgcgcgcccctcggacaccctggaagcgacctgcggccgggtggcaggggccgccagctcgcgagcccgaaaaggctggagactgggaggggttgcattttcctagcccctgatcccagtcgcgcgatctggaaacaacccctttgctttctagtctcgattccttacgggcccaagtgccaagggatcacagaaaagggagccacccatcaatgcccaagccgaccccttcaccacgtgaacgccgggtcaaagctccagctccctaaacctggctcgcgtggactgggaagggggtgtcccaggccagcagagaatccagcgtgccgggtcctcccgaggcctccgtgcgcccggggcgcaggctttgcccaagtttgccgggagatgcccttcccagagccggagttgtgggccgggcgggaggggcccgtgattgacaggctgaactacagactcatctcttaccttaggccgcgggcgctgattggctgctcgctgacatcctcaaacccggctgctcggcgctgggctccggaggggggcggctgcgggtggaggtgcgcctctgacaagcccgaaagtcatttccaacctcaagtggactttgttccaactattgggggcgtcgctccccctcttcatgatcgccggcaaacttcctcctcggcgctgcttctaatggagccccacctgctcgggctgctactcggcctcctgctcagtggcaccagggtcctcgctggctacccaatttggtggtaagacttgcctcttgtctgcctgcggccccgatctctcggccgcacccggggacggtgggaggcgctggccgggtctgggctgcagcaggcctggggctcttttctccttgcttcccgctagccccccagccgtccacccctcttggatcttctgctggtgtcgccttccgaatccaactcctggcttctcagataatcaccattttccctgctacccgccgcagaggcgggagggctctccctacccctgaaggtctctcgttcttagtcttcaccctctcccaccccaatttgggggtcccgaagaaccttcgtttgctcacacttgcatttctgtgctgtccccgcggcccggccactcctcttctccattttagggtctccgtgggtaaaattatcctgtcctttttcgccaccgcacctcttcggtgtctcggtcaagagatttcccccacaatactcgcgtttgccttcatatttgagaccttaagggctttgggaatcccaagcaggggacttagggggtatttcagtagattctccccactccgttctagattaattttgagcctctgaagtgactatagaatttgctgatcctagatgccattgctgatccgggtgtattcgttccttgcttgtccatcccggagaaaagcgaggtgggggctctttgaaaatgtacttgtttgggaggggtaggcttgctgggtttttttgagcgaaaacctagttctccatgtcaaattcgttgcttttggaagacggggaagctaggagaaagggcgagggaagggggaatgctgtccctgagaaatacggatacaaaaggcattttagtaaataaggctgggcgagcaggcggagtacttggagctgatgggtgtgtgaagggattcactggaagataaaccgccttttggaagccccagctccagagactcccctgttttccaagcctcattgctgctcctcctctgtaggtcctccggtggaagacactaaaaccagttttctaaattacaccccagccctctcagtctccagccccctgcattccggaaaactttaataaaagaaccctcccctcctgggcagtggctagagccctggggggggtgggaggtgaggaggaggaggaatttgggacctctgagtaagaaggagactggcccctggggtgaaagttagaagtgctaccagggtaaagtgctgcctacatggccccctccctgcctgctacctgcaagcctgcagtatgaggctcagagcttataaaatactgggccacaccccaagcctttttccagatgctttggggtgtctgaaggccaggggagggggcagtcatgaacccaggcacccaagccatggcctgcccaaggttctgtttagagggtccaggagttgctccttaggttgataaatacgccaaggacagaccatctttctttcctgtggacttgggctggtctggggctcctgtgtggagtctatagagcctgtgcatgctggggacagccagggattccacagtgaggttctgccaattggtgaaaggttgcctctgcctccggactttccttcccccagccaaggccaaactctgccttctcagagaccctgcggtggcgggtgcataggaagagagggtgcctggagccctagggatggcatagaggaaaaaggagagagtgggcttgctagttctgtgaactggaagagagcacttcctggggcagtaccagtaggttagatggtggtaacagtagcctctgtgtgtagtaatgtccaggaatatctaggtaaggtccccatccgacaagaaatattaggaaaacctggagggcagagacaggtcctaacataacatacatggcctgtttgggggttaaggggggaccagatggctgcttttgtctgagccatagagagtatgtatgggtatttttgagatgggtggtttgtcagtgcctgtggctacgacctctgtgtgtgtaatacagtgtgtgctctaggtcagtgaccctaagtgtctgtgtacctgtatgtctctgtgggtagaagctgttagtgcctgagacccaggcaagtgttttgtgtgaaaccttttggtgtgtgcctaggggatctgcggcccacagcagggtatgctgtatctgcatacaagtatcagcaagtggctggttctgtgatgtgacacagaagtcgagaagtatccgttgcttgtgtaaagggggacctcctggcttttgcctgtgatactggacatggcagtatttgtgtttggacttgtgtgctgtctgtgcatgtgtctgtgtgtgtcccttcacccgcgcatgccttcctgacagcgtaagggggaggcccaacaaatgtctttgtgcgtgagatcggtgttcgtggcatgaccagccatggttggaagtatgagagtgagcctgggaggcctggctgagggctgtgtccgggcccagcttctgatcgtgaccccaaatgccagtgacatagttttgtgccagtggttatgcgtctgtggtcatgtttgctgacacctgacttgtgggtgtgaagaatacctgaaaggggtgcttggtggccatcagtggccctgaggggaaagacaggcaggaagtggaggtctcagaaggtggctgcagacacaatcggtctgggatcccagctggggtgggggcagggccttccttgacaccatcaagccttgcttgcttgaggactgtggctacgagccttccctcctctaaggtcatttccctttcgtcttggagctggggcatgaatcaccttcatggggctggaagtagagagtgggtaggcctcaaattcttgattcccctcctctgccccaaggccggcagattccaggcctttgagtccgtgactgcctgccacctctttggcccacccggctctcacgttcacccagaggatttacaggggaaatggcttagctgggatttctgtccacatcaccttcagaaaggacccctactcccagtagcccatccctgcttttccttgcaagggccccaactctgagacaaggtgatgaggaaggggctctgaggggcctcttactctaaaaggaagccctgtgctccagagcctcccagcctggcagtggctccattggagcaggaccagtgacaaccagcctgctttctagaactctccttcatagtactagttagctcctagtaaagaaatctgtctttctctttcttgaggaataagatcgttctacggccttgccctgtgccatctgtgctccattggaagtgccctgaaaaaggaggcctggttggctgggtggtgtttggcagctcacttcacactgtgtggctgaggactggtgattcctccccacccccccttttgggggtcacttttctcactttttacccaaccttgcagtttagaggggaaatgttttgctgagggctccaagcctgttagggcgcctgggttctcattgcaccactccagagcccatcctccacccaagcacctatcttaagccctgcctcagtttctctatgtgtcacatcctgctgcctcccctgctcaacgcccacccaacagccttctctccgaggcttgggaactaaggaacgtgttcagtcaaacccccgtgggggtcagtgggctgggcccagggaggcacctggagactgtgggggaggaaggccccaggccaggtgttaacacttgtaacaggcaggaattacagctggctggggctagggctggtgagccgagctggctggaggctgttgatcccacagacagtcagtcagtcagacagacagacagacagacagacagacagatgggagataccagatcggatggccaagctttagcagggtggtcgctcttccagagaagatcttgccgtgggggaattcgtctggggggaaaaaagaatgatgggccccttgaaaatgagttcacagcccacccctattgtgggcggggccttgtgctacaaagggatcgcaatttggtggttggtggtagaaggttggtatccttctaatggcatcacacattgccacacaaacaacaaacaagacaactggtgaaacaccagctagtatcaggaactgtgtgtgtcctttagaaaagcggactggactttatagggaagaaggcacgtggttggggttgggatagtggttgaggggggacacagctgtcagaggaaagtcctcccctgccccctccccccttacaatctccaagtgtcttattaacagctttgggaccaagaggtaaaagctgggtgtggcccacttcttaacatagattctgaggtcttggagttttggatgtctaaactgcattgaatcctggtgtcagaagaggtgacctgggagcctaggccttcacaaagctggtacctgctgctgctaccccactgtaaactcagctagagctctctagggcccacgctcactcacttctgggcctctgctccaacctccattaaagagtcaaaacgagggccccaggtaagagtccccaagggacagactggtccaaggaagatttccccaccctctcagggcagaactcactgctcacaggaggacacagttgcctggaaggttagagcagtattcatgggcctcctaccaaaaccgcgaagagaaggccataccctacatttacccagcatccccctgttttgttttgttttgttttgttttgttttgttttgttttgttttgttgagataggatttcttcatgtagccttggctgtcctagaacttattctgtagacctgactggccttgaactcagagatccttcttcctgcttctgcctcctgggtgccgggatcaaaggcacctggccagcacccttcttgaaggctcggccaccacatgttctgtttctatatattccctctggggagaaatgtttcagcctggaagtggagagccacgtctgagttctgagcttaccatccattggctgtgtgacctagggtgactctgtccttcttcagctccctgcctctctcttgactatactgagaggtgtccattcatcttcttagagcctcggggatatgatggggactccacagcagatacttgggacctgcctgaatcagcacaccccttgatttctgtggcttggtgtacctgccctaagccccactttccacccaacactgccatgccttcttaattcacttccaaacctcacgtaagggctctctattcctctgtctctgggctgctggcaaagtgacctctccccgtctcagtttccccataggaaaaataaagttatggccgctaccccatgaacatcagtgatcaaattcaggccccagaatgctgccggaatgcaggaagtacagttcaatgtttgaacctcggtctggccctgaatccagacttgtctcttcaaataaaccctccgagattggcccccatggctctcatttcttcttgttccatgtgcttggcactggtgcccacaggcttgtaacttccttcaaaatcagaagttcagctttttaaaatattttttattatattcatgttagtggtttcctacatgtatgcctatgcaagagagtcggatcccctggaattaaaattatagacagttgtgagctgccatgtgggtgctgggaattgaaccctgaacctctgaaaggaccagtgctcttcaccactgagccatctctccagcccattgaagttcagcttttttttttttttttttttttttttgctgcctaggggaggtagggtaaggtggacagaggtggtctggggtctcccctaatcctcctgataccccacagtcttctgagctcggaaacctctgtcctctccagctggaacacagagctcccgggcctggtggggaggggtaggcttggggccctggctgctggagcagccccagcacgaggtgaagttgcttctggagctgggggatgactcagagggtgatttatagacggaaagcagaaagcttggctcctggcagaagcctgctgcttaattacattctttggggggtggaggtatgtggggcgacagcaagggagagacttctacctcgtcccctccgggcctggtacctgtgatgtcctagcaccaaatagggttcttcttagagagtgcgtcccctgtactgaatgcacggttagccactgagaagaggaagaagtgggacagaatcatcggaaggacagagtcccgtggggaccaccccagggacaggctgatggggcacacaggaagagtgggatgctgagaaggatcgctgaacctccaccctgcttctgccgaagaatccctaagccacctgggcctctgggtagccactctccacttccccttcgcgtggttgcctgtgaagaccttcaagttggcttcttgtcctgtggcttgggtcctggtagcccatgcgtgcaggagaccaggcctggaactcagagactaaactctgcgtctttgggttagatgacctgttgcgtggaagtgtgatgactgctgcaaaactgcagcggttctggtagcatcagcctcgtgctggagggaaggaaccccactaaccctgcctttaaactaactacagctagcctgtctgcccatgctgaccagtgtagtgactccaacacagccccagatactgaatttctgggtcaggggtcccaaaaggtataggacaggcaggggtaaggaggccaaggtctgcagcacctggctgcctgtttgagcttggttagtacagctggcaggacttggcaggggtcaggatggggacagcagacagctctccagttccccctgaggcaggccttctcaaaatggcctcattaatgcatgtggagtgaattccagaaatgtcaggtatactcacacatctaaagaaggatggggacccagaaatgttctgtgcttggagacaagaggagtcagagtgagggatggtttccaggtccgggatctgaactgttggacatggtcttcctattgcaaagtgatgctctgtgctcaggacagtggatgtttgagttttctgtgcctagtgggagactggaactgattccgggacagagtagagaccataaactttatatgtgagcagctttgaggtgcaagctgaattgccaaccttcccagacctcagttttctcatccaccaaatggccaataacatgccttccctgcccatggtactaatgagagctcaggatgtctgtcttaccagagtcagctcagcaactaccattgttagaaagaagaccaagatccccaccccctacccagaggaggtgcaagagtatctgtagtggatccccaatctctgagtagaatctctgggagcagagccgttgcttgggtttaagacccagtgatggcaggtgtgctccagtttcagctctggaggtccacgaagagcacataggcctgatccccactgagacccggttaggaggtctgggtggaggtgagggcaaggtaggcagctggaagcactctctcaaagcccgaggccatcaggaaatccaaacacccccagggaatgccaaggaaacccacagcggcatagccctgttccctaactgagctagagagacttgaagagaatgtcctgtgtccctgtgttggcaagggggatgggagcaacaggaccctgtgaccaggtttgttgggagggcctttctgccaaacctgcccctgggcgcagagtcccacttatctatcggagccagccgggatcagcaaggaaaaccaatcttccagagcccgctatgcatgcaaatgggggcttgtgaccatgtgaacctgcacaccgcctctctctagttcctccacacttcataacgtggctttccgagggtgtcattctgtccctctgaaacctctcatggttctgatctagaccccctttgttttattttggcctctacctgcctatacaacatgcctttcagaacccctctcccactccttcctcaaaccgaacacaaaatagtacatgaacctctgcatgcctccttcctctgacctggggaaggcagtaggacttgacccctaggttgaccagggcttatttctgctctgccaagcacaggacctggctggcttgtggcatggagctgacaaccctaaactgtgaagggcctttggtgtctctaaggcaatgggaccctcctgagcagactgccgcagccgtgctggatactgggatgtctccaccatgtccattcccttgggctttgttgctcctcctcagcccagattgaagaattctatgtatgtgttagagcttcttctatgctcacccagctcttgctatgcatataaaagtgtcaggacctagggacaggtgcctttgcatgctgtgtggctgtctttagagacctagaagatattcttccaagactaacggtgagcagctgctttgcacagaccacacgtggtgggagaagggttggagcccacattctgcctccactcggggtcaggagaagacttcctagttagaaggaggagaagctgcttgtcnnnnnnnnnnnnnnnnnnnnnnnnnnnnnnnnnnnnnnnnnnnnnnnnnnnnnnnnnnnnnnnnnnnnnnnnnnnnnnnnnnnnnnnnnnnnnnnnnnnnnnnnnnnnnnnnnnnnnnnnnnnnnnnnnnnnnnnnnnnnnnnnnnnnnnnnnnnnnnnnnnnnnnnnnnnnnnnnnnnnnnnnnnnnnnnnnnnnnnnnnnnnnnnnnnnnnnnnnnnnnnnnnnnnnnnnnnnnnnnnnnnnnnnnnnnnnnnnnnnnnnnnnnnnnnnnnnnnnnnnnnnnnnnnnnnnnnnnnnnnnnnnnnnnnnnnnnnnnnnnnnnnnnnnnnnnnnnnnnnnnnnnnnnnnnnnnnnnnnnnnnnnnnnnnnnnnnnnnnnnnnnnnnnnnnnnnnnnnnnnnnnnnnnnnnnnnnnnnnnnnnnnnnnnnnnnnnnnnnnnnnnnnnnnnnnnnnnnnnnnnnnnnnnnnnnnnnnnnnnnnnnnnnnnnnnnnnnnnnnnnnnnnnnnnnnnnnnnnnnnnntgtgtgtgtgtgtgtgtgttggggagaagctatgtatgcatttgtgggaagggggtagcttattcatgtgtgcatttgagcatggagccagaatacaacctatggtttcatatcttgggcactctgtttagctttggaaacatagtctctcactgagacattaggttccctgattcgtctaggttggttggctagtgagcctcaaggatttccctgcttctgcctccctagctttgggattacaggcacaccaccacacccaaccttttcccatgggttctgaggaatgagctcagcaattagataagccatcttccctccctagcctcagaattcatgcccatagcctagccctgagttggtgtttctgggctgttgagtctttccttgactttcacagctagacattcagcactatttcctgctgagaagccagaatgctctctcctttcttataaagcatatttcctttatgcatcagccatttaggaaccccagagctagacttgatactcgatgtttgcacctgtgctgaccttgggtgacacattcgtcttctcctttgcctgatccagtgttttcatctccattctgccatttatccagaaacattttgtattctaaactccttgcgggcagaccccatgcctggagcatctagagttcaccacgcttggtctctgtgtagcggctactgatgctccataaatatgttttggccgtcagacaggacgttggctgccagctgtgctgagttctttctgaaaagaggcaaggcagaggaaaatgagaacgaaaaattcattttgtcagcatggcagcagtatgcctgtgatccctgcactccagagactgaggcaggaggattgcaagtttgaaaccagcttgggctctacaatgagagtctgtcgacacaaaagaaagaaagagggaaaggggtgggtaggggagaaaaaaatggctgtttctgagaagcggctctgagctgacagttttgagttgggggaagcgcatcctgtatcttccccagaaaccttatctctagggatgctgtttgcaggactgacggtgctttagtctaagcttgaaggtgtcatcccacctcttgggaatctcaaacattgtagccaaggatgaccttgaccttttcctcctctttcactgccccagtgctgggcttagcccgcaccactgtgcctgggtttatttggtgttagggattgaacccagggcttcatgcatgctaggcaagcactctaccaacggagctatgcctcaggttggggactttgtgtctgccatggctgtgccttctctttgtttgctccccccaccccatgcctgtctgtggtgttctccttgggagatgactaattgatgctcttgataccacttcctaggtgacacacaagtacccaagtgccccctttccatctccccagcagctattgcagaactaccaccctgtaaaaattcagggcggcatgcggatgagagagagagaacacaggagaccacactcaggaccacatagggtggctggcctctctcaggccagacgttcccattggcaaagctgtggggaagaccccaagtagacctggactaagccacatcactgctgtggcaggaacctcacaaaaaggagaggagaacactcaatcgtgcattgtggtgcctttgaccccaacacttgggaggccaagacaggtagatttctataccttcaagatcagcctggcctatgcgggaagtttcgggacagtcagggtgatgagagaccctgtctcaataaacaaaaatagaagtagagaggagcttcagggtaggggagcacagcccgccaaccacctggcaaggcttcagttcacctctatgctcctgcccttagttggccctagacccatcccagtcccttgacttcagccaaaagagcatccaaatctactgtaggtggacctccataaggtccagaactttccaaggatgaccatgactctggcatgcctttgaagctaaagctgcaccctgtctccagaaagtgggcagccagggagcagattttaatcatcagcgaggaatccatctgtcctttttgaggttcctgcctcagcctggtgtgcacagagggaacacatcacctctgtcagccttagaagcatgctcttgttctccccattctacaggtgacaaactgagcccttgagagaaccacttcagggcctaaggctcctcaggctgtggactgaaactccaattagatgctgactgtaggaagccaggccctccagggttcacagcccctcactgatagccaggaagctccctcaaggtctatctagacttagtccaagcccagacaatttcatttggtctctgggatgtgaacatcactgaagggtctcaatctgcccttgtgattggatatgttgttcctggagtccagggcagtcctttggaggtaacctgaaagtgccattagcccaagttatgaggggggtcctgcccaggtctttggggcagagggctctgcaccactgtctgacaattgtgcccctttctctggggacaggaatctgaaatcccagggccaacacccctagggcccacacccaccctggtgatgctccaggcatcccaatatctggggaatccttcccagatgactgtaggcctcctgagctctctgggtttctacctaaagtctgttctattagagaagatgacagtactgatgacccaaaaagaggtcagggcagggtatttgcaggggctgtgggtacctggagggttagctaggtgtccagcatggtgagccctgtagaggctgagggctatttctgcccatgtcaccattttctagaatgaactccttggaaagactgattttgcttactatttaaattttgtattagtaacacacacacatatacacactttctggaagcacatggcaagactaaatcaagaaagcacatgtgtcctgtggaagtccaggacaaggatctcagtttgaatgaagagtattgacatttgttaacctgaggtgaggcagttacgtctctggtacctgacaaacactcagccttcatttaataatctcgtcccacacactctagccaggatgaaggagttggatggggaaatgggtctgtctaggttctcccagcacagaaatctcggagaaggcttgaccatcttggtgtcccccgcccccagccccctccagccttgcaacatgggctcaccctagcaggagaggagccccttgtttagcagcagtaccagggactgtcccagctgtgttcctctcaccttcagggccctctttgcttcagggcctcatcttgccactctcggtctcagaggaccttccctgtgcttgtggctttagatgatgtgaccagaagggcagcgactgcatcaaggaacacacccacctgactgtagtgttctttaaccccaaggccgaccttgaccctgcaccaccctgcaccttccagccccagcctggctctcctcctggctactctcatctctaggatgacagtcccgggcttccatctatgtagctgggtgaccttactttctctgagcctcaacttttccctctgtaaaatggggatggcaaggattaaaggatgtaacattatatgagacagacaaggtctggcgtctacacagtgagtaatgctcccatttgccatcattaatctcgctgtctattttgttgttctcgccatgcatcaccgctctgcgcttttgtgctcgcccctgccttcttctggggaggttccgaggactcctgtccgctctgtgaagtgaggttggtaccattgtctcaccagcacctgctccacctgagctcctcccggggtctcagtgggactccttcaactctacccaccttgccaggcagcacgggacaccacgcagcatctggggacaggtcttaagctgaggggcactgctgtgtgtgccctgcttggcagaggcccagtcttcctgctccaggtgtcttcctcctcccaatgtcctcctcctcctcctcctcaggaagactgactgacacttgtcatctttcttgacttctcagtcacatctcattggtatctatcttatccttccaaagaggggaccagctcttgaggacatgaattctgctgtgtgtcttggtgacccaactgagcttcatatagcaactctggggtgcagagcacagcttggggagcactgtcgttctagagattgttgagccggtgactcaggacccctcctcagaagctccggtgcggctttcgctgcttcccgtgaactggatagcagctccccctcacccatgatctcagcagggcccatccttgagcttctagcctttcgtggacacatagctctctcgctgcatttgaagaagagctgtctgtggaaaatggcacgtctcagacttgttggctggtggctctcagactttcagagcctccatttcttctatgtaaaacggcggcgggggtgccgtgttgtcaggaaaagttgtgaggtcctgctacataggggctgggctgacagggactgatcatgggtggtatgcaggtcattccagtccagcgagggttgtccagggactcagtaccgggaaagaatgcaggtcatcctgccctagagaaagggccacgcttggggaaagctatacgccttgtgatggtgtgccccaattatcaccttatttgaaaaccaaaatgggagtggctcagagcaggatgcaagtgattcagtgaggaccctggtctgaccctgtgtcctggtgtcctgctcagctcctgggaagaggtaggcaagtcagatgtggtggcttcagggagttttactggggctcctgggctggcctgtgcaggtttaatatggctgaggcatcggtcatttcatccctgagaagggtggtgagtaagccttgcctgggaggctggggccgctgtacacatctgtctttaagggaagagggccctgctgtgctgcttaaagtgtcacagacaagaatgggtggcctgtgtgtgactgatatgcatcctacacagacaccagctgttctgctgagaattggagaatgaatatgctttttattatatagtactttatgcacacaaagcaaacacatcatctatgggatgtcataacaagatgaaaccttgtgcttccccacacccggaagaaccagaacatcagcatctgtccttaggcttctccctccccaccccatcaccatctccttccacatgtgaccacatcctgattttcgccattttataaagagagatggtggagggggtggggggaatgtctctcacccagtctggaactcactaattaggctagactatccagaaagtccctaaagattctcctgttgacccttccccagtgctggagtgttaccaccacacttgtttgcatggctgctggaaatggaactcaggtcttagcttacaaagcttactgatggagccacctcctcaggccctgcacagggattccatgactgagataaaaagccggctggatgtatgggcccacacctttaatcccagcactgcagaggcagaggcaggtggacctctgagttggagttccaggacagccagggttacacagagaaacactgtctcaaacaaacaaacaaacaaacaaacaaacaataacaaaagataaaatgtaacctgagataagaatgcccacaatacatttttcactttgcttgttaaaaaaaaaaaagagagagagatagtttgtgtgtggtcttctgtggtttcctcttctttgtcttattttcgagatgggggggggggggtcttatgatatagacttagctggtctggaatttactatgtagaccaggctggcctcgagctcacagaggtctctgcctgccaagagctgggattaaaggtgtgtgccaccacatctgtctttgttctttctattttttgtttctaagttcctcattgttcctgagtctttctatatttccttcattttccccactgtagagtagtcactgtgtctgcttccttctttttgtgtacacaggagtctctctgtgcccatggaggaaagctctccctccatacacttgccttggagtggagcagtaggtcctggctgttgaatgttcttagagtgatgcctagccattcccaaacatgctcctatctccttcctctctttcctctctttcctctcttccctctctttgcccatgatcttccaaagctttttcaaactcagagcccccgttgtcccaggtctcttaccagcttggcttctgcctcgcccccacactgcacatcctccagctcttcggagcatcatttggatggagcactaggtctcaaagtgtgtctcatcacactggtcttatgtgatcctgctgggaaaggcttctagggacaagtaaatttagaagttagccttgcttgttggaatctcaatgccaccaggtacaccacagaggtgacccttgctttcatttgtctagtctttccccaaaatagctagcccaggaaatcctcctgcccctttcaaaattcagtttggtttttatggtctttattttcccaactgggaggctgcgattttttgcaatgtatattttttttaacattctgcatgaattgaggaagtttagtctagtatctccatcgcttgggggtctcgagatgatgaatgaaaaagcataagtggtgaatgaaggcagcagttagagaagcagttggctcgttgctctgtggtccagctgggtctcttgtcctgaggagtcagaagctatggacaacttgaggttgtttggcccgtgtccaaccctgcctacagtgtttctacccagccttcctccaacacccacgtggaatgagtcactcccattaagcctcctgtcactggtttgggggcatctgtttcatagggaggcctgaaacccttgcaagggcagaggctctgttccatttgccccctaggttctcaagagtggctgcttaccctctggctggtggatgagtgcagtcggaggaggtctcctgtgtatccttgccagggactagagggtactatgacagtctgcaggctctggagtcagaccagatgagccctcatagacctgccagtctccacgcctcagcttgggaactgggcatcttctcttctttccacccacaattactctactgactctgggaacagggtctcactttgtagctctggctggcctgaaactcattatgtagaccaggctagccccaacaattatgacaacctcccgcctctgcctcccaagtgtagtcatgttccactgccctggctctttgtttggtggagttctgtttgtttaaattgagacaaggtctcatggagcgtgggctagcctgggactcactataccgtggaggataaactctgatcttcctacctctctctacaagttctgggattaagggagcacacttagttaatgtgatggtagagacagaactcagggttttgtgtgcatgaggcatgaattgagctacagccccagactgtttgtctgttttgagacagggtctcatatgtagctctggttgcttgccaagtaaataagacttgccttgaacttgtggtgactcccctgctgcagcatcccagatactgggatgtgcaggtgtgcaccaccatgtgtgacattgctgggttttattttgatcctttgttcatccctacaaactagaacccataacagtgcttggttgttttggggttgggaatggagggagcgaacctacaggtaggaacttgggaagcccaagggtagccaggactttcatggctgacccaggaagctcagtatcctgagaccaagatctctttgacacagcgtggctagagcgtcctgtgctgtagcagtgtcctagaatggagggctcacagggcgtggcttactgccgtggtcctcagcctcctgcacaggatggtgtgcgctgggagatgcttgcacacagaacatttgaatcacttttccctgggcttagagcgccaggaggtcagatagcagggcctgaggatgctagaggcccacttaccattctcaggcatacaccacttggccttgaagtcggggaagctcctcagacctcattaacctcctattgtaaggagcctcaccagctccagagcacctgctctcttctcttcgcactggtcagccttagttctagatctgtcttccctggcctcccaacagaagagatagatcgtggggcactgcagacaggctgaggtgaacgtctgatgtgacacacggatgcctggggacgttcactggggagcagagaaacctgggcatttatttcatcccaggtaacgagctgtagtcccctccacaagggagaacagagcaggggtggttcagaggggtggaggcacgtaggtgagattgccaattgggtgtccaagaggcaaagatgtcattgaaatgacagagccagagaatctagtagagggagactgagatctttgcggcagaggaaggaagacattcaaagcaattcacagaccactggtcttctgagagctcgggtagtgtgagaggggaaggggagatggaggtggtggtaggctttatcctttctgcagcggtacaagctagaacgcgtggtaacagggtggtatgaatttccccagaggtgtggaaggctcctgattggtctgattcctcagcctcctcgtgagacactccatcaggttggacctgaaagtactcagatccctgccaaccgccatctttcagactcacagacagtctccacattgctgcctgagggatctgaactcagtagctgactgtcacccctgtctctgtccaccttgaccctgtgtgttggtgtcctacttacatccctatgtccaaggctccttccttttgagagcagagaaatgtacacagagcatccccttttacctccttccttcttggtccaggtcccacccactgggaataccctggatatacctcttttgcccccagtgtgtgtaatacatcaagggttacactcggttggaaggaaaaaatgattttaaagcaataacagcaacaacaatgccaagtgtggtggtatctacctgtcatcccagcatctcggaaactaaggcagggtaatttccataaattagcatagcctggtctgcatagtgagttccaggccagccagagctacacagtgagaacctatcttaaggtaatataatttaatataatataccactcccctatgtgttttgcaacccatcctgccatgtggcccctttctgtgggttttctcagctctgcttggaagttgcctgtgtccttgctattgtcctttagtccctgtgtgcatagccctgttattagattatacagtcctccgggtgaggggccatgacagcgttgagttagtgtgggacacattttgggtgcagaataagtgaattctgccagaatgagtcattagcggagagtggatggaggccgttagacacaatggcagcagcataggaggcgagatgaagccattcagacccctgtaccttctgagtctgccttctcgttggtgcagtgcattagcctgaaccccttggagcttttgaaagaataaatctcaatgagcaggttctggaaaacagctttgcagtctcaaaggtggccagctcccctgagaagcccacatccacactggttccgagaaccctcaccttctgggcttgctatcttggaagaggcccagtcacctagaattctctgtggttatttgaacccatgtgtcaacccttctgattctgggacagagctcttttgtctcttgaggatgcctgggacatggccctgctttgatacagagacataaacatcaagggtaggaaatccacatcaacattcaagagagaaaataccagtaagaaggaaggctccagtgtgagtccagcactcagcctgaacaacaagacaggctgggtgtctcagctctccactgacacactgtagagtctcccaccccaagaagtcccttcttgctttcttagcagcctcagtatctccatcaccagctgtatgatcccaaacatattacccggcctctagaacctgtgtcatcacctgtcaagtggagataataatgtcgttgggttccttggcaaattaaaggatgtatttcatgtaacgtgctttatatgataccgggcacagagtcagggctcaataaatgctggccttcacaaataataaccattgtgagtgccctggagatggtttcaccccctccactcccttacaccagagaacaggaaatcatttcctcacggccttcttaacaactgtctccccaaataagtgcaccctatattatcttattcaccctgagtgtgcacctgtaaagcggcccctttattccatttatagctgtttccacaaagaggcccccattacctcatctccctctgttttgtgggctcctcctgtctgtggccactcagggccagtgtgggttctgagggagccttggccacaggtctgtgttggcatctgccctcacgcgcacacacacacctttgtagaaaagtctataatttcttcaagctttgtggcacatgcctgtatatctgtcaattcaaaagactgagacaaaaggatagaaagtttaaaatgaactatatgtctttaatcccatcactgaagaggcagaggcaggtggatttctgtgaattcaaggccagcctggtctatattgtaagttttagatcagccccgactacatacattctcaccaaagggggtaagaaaatgaaagctcagagtgggtcggagagcttagtaggactatctatctctatctctatatccatatctatataattggaaagggctgaggaggaatagccttgcagttcagtacttgcctagcagtgtgaagtcttgggtttaatctccagtactgaaagaaaaaaaaaatctattggaatttctttatttaaatgtgtgtgtgtgtgtgtgtgtgtgtgtgtgtgtgtgtgtgtgtgtgtgtatgagagagagagagagagagagagagagagagagagagagagagagagacttttgtatacaaagcttgttcttctccagaagaaatacaacaagacatcagactatagaagcagaaatgcctgaggtatcagctgggccctgcagcctcctggggtgacaagattgggcacagtgagaggacatgggtgaacagggagggctcagcctgcagaatgtatcctttccccgctgggttatgcacaggaactcagaaagatgtgggtccctgtaagaggcacatctggagaccttgaacccaaaacttctgtggacagccagcatgtctgggagctcctgtactcaccaacatgtaaaccccacagcaagactcagcaatctgggtgtagaaattaggagaagggaaaactctcggaggaagagagatgcaaggaggaatgtgggcaagggggtggggtcccccaacagtgccaaagacaaggtttcttttgaaagttttttcatggtgaccttccttttcgaatggatgttagttagcgagcggttagcagtgaggctcttaaactccaagcttggagccgcctgtgatttatacctggcctatgtagatgagggacatgcccaaacacttttcgctcatactgctgatcaaaaacagtttggctgctgcggctgtcaagatggaggcttgagaaacctggagagctagaatgaggaaaacaccaggcttgggaagaaaggaggctgattctgggtaccaggatgtacggcgtagggcggagcagatagggcccagcgctggagccccatgagcggtcctagtctcctttggctcttggcttgctccttgaaatgaagcgaagacccactgagcacccagacttctccatcctatggtgcagacatcagactgtgaattctgtgtgtagccagcattgaggctgagctgcccttctctgagtgctagaatacctagcgggagtcccgctagcagctaggagtgtggagtgggcactcacaaacccagagaagaaaggctaggcttggtggagaaactggaagcaggagcccaagactggtggatgtgaccgtgtgggtgcggggcagggggtgcgcaggaaggtgttgaggctcgctcccgggaatgggcccgggagggaggagcaggcagcgctttgaacttgcgctcagcctccagaaggagggcgggggaagtccaggtgccggccgggctgctttcacctgcggatccttggcgctttgggggacgaggcgcaaggaagacctcctgggaatgcagtggaaatacccaccttgaaaggcaaggagcgggaacatagccctgagcgccgggtgtggcgctgctcccgcccccatccctacccgcctcacgctgcagcgcgcacctgctgctggtgctggtactggtgccagtgcccattccagggcctccccgacctgttggtgctcccagcatctgagccatcaaggttcctgcccacaggtttcatctagaagtccccacaaatgagttgggagttttctattgttcttcaaacttttattatggcaatcattaatgaaggctgtggatcttgcttggagatttagggctggcagagcatgctacaagggcctgatgttcgttcatcatcacaaagcagccggggaaatgaactaggaaagtcgaaaggggggcaggagatgtcgctcagttggtggagtgcttacctcagcatacctgaggccatggttttgataaaccccatcctacttggatggggagtcagaaaggttatagctagtcctgggtcagtcagcttattctacatagcaagttccaggccagccagagctacataacgaaaagtagaggaaaataatataaggagcaagagtttacacaccttatagtgccaccatttaaaaatgttttaaacgtgcacgtttgtgtcaaacaattacaaagaaaattctattccgcatgagcgctgagattccgatatgtaaggctgcccccaccccatcaaaccgccatgctggttaacaagacgtctaagaattcccgatgattcaggttgcctaggtgtcctcctctctgcctttacccaaagggttttcaacgcaggctccactcatttcttttcccttgtcttcattttaatctcaaagtaattcattctccttatgcccaatacactggctcttcagagagctatggtttgcagtctttgatcatgtgacctgttctcagatcatctgcctgcttctttagagtcatatgacttgtgcttctgtctctcgtcttcctgacaactgagggttacttaggcgaaccgtctttggctggtgagctttatggaggaggttgggtaccccacattgcgccatctccagccatccagctctcctgcttctttggaggtgtttaatagggtttctgagtctctttcccagatgggctggtccagcgggttaggactggagtccatgtgtctgggttttgcaaatctgcccctttgctggctgtttaagtgtctcacctgccttcctggcctcagcagtcagctgggcagtgctcatcctgggccctccaaagggcatggggagggaggtgtgggaaaaggtgagttctcatggctctggctcagcagatctgaatgtctggatctgggagttggtagttcttatagattataaccacgcctataaacatctgtatgctctcaacatctagcacacagctggcccagtgtaattgtccctgaaatgaagatctccaccaggctggtggccctcaatgagcccctagaaagatggtttctggtgtgagcttccagccaataaatagctcagctttctgcatttgaagactcagagaaagacttccccagggtgtgcagcagttgtgagaaaagtccagagagccagcagggtgtcttctgctctcagcttgtcatggcagtagcctgagtggggaggaaagactggggaggtcagtgggagcctctgggtccagtccaagggggtcctgggcccattagaaaagcagactctccacttaagtagtcaccggtgagggagggaagttgtcctctgaaaaacctcaacttttagtggagagaacggctctgtagacagctcagtagagaatgttcaagatctatcttcttctgacaagctgaagagatgaccaggaggaacagtttcaatccagaggggatttttctaacctcagatcttgaggggtgactaggagctcaccgtgagatgaatggccagggaagctgttttgtctttcaccagaacttggcttgaagggaaagctctatgagaactgggaatggttctgacctaggaaccagctgtctgctttcccagaaccattagccaggccctgccaagccctcacttcactgcacgtgggagactgccctgccggagagggtcagcagggaggaagtggtacgccgctcaaaggaaccaatgaagcacactgggcttaaggaacgtttatagttctgattggcaggtcagtaggcaaagaaataaatggcagagcccggagagaaaaggatgtgacctaatcaagctgagcttgaatttcaagccgaaagcacaggccagccagctctcagcctctctcccctaggcactcctggcttttagaattcctaccccaaacgggactcctcacacttggtcaactacagattgcctcttctgcgtagaatgggaggccccatccaatgtatacagagcaggagctgtgctggtaacagaaggcgttccagtgtgctgacggaggctcggtgaggcacagaggagttctgtgaggtacgaggagatggggctctggctcgaggttcaaaggcctggaccatcctcctttcaccttgaaccagtgaaggacattggatgagttacatcacttaaggggtgtgtgtgtgtgtgtgtgtgtgtgtgttgagaaaaagaagttaattgtcccaccaacctttggctttgacattttatgacttgatgctttcatgagtagcctctcaggcagctggctatgggaccatttacaggaggcttcgagtggctttccagggcctcttacattctgtctctcctccagcaagacataggccagccagggacacttttcaggcagaaacttctgctcagcaagcctttattattgatcaaccttcacgcagaaacccccgttctaactaaccatcgcttcagggagggtggacatgcccccactagaaaagactaaatgcagtctagcacagtcatttgcaactgcaagcaacccaagcaggcctttgatccttgatcatcttccctgtgaaacagagcctgcctaactgtggcctctggggccacaaaggcaaggatcagacctgctcagtgggggtggggaagggaagaacatggggactcacttgggaactgcttggttagaggaaatgactcagtccttgccctaacctcctggaagccctgtctctgagacagctggcacttctcagagagaccttcttggggtctgaggtgagaggcccctgacctggacctgctatctggatgttctgggctgagtttgcttctggtaagtctttctagagaaggtagactaggccaggctgcagaagcccctgtctccttctttcttgccttccactctttccccttccaattctctggatctctccctctcttcgtacagttaactaattcccttacatcctctttaggacccatcagcctgcttcatgctccaacccctaatttagccaggagggacagtccttcctccgttctccactgtgatcaactcccccttcctatgaaatggggtgggggtggtggctcatgctcaggacacctcaaaaaacaggtttcaacatttcacaggtttcaacatttttcaggcggacttgtcacacatcttatcagatcagagccttgcaagcaagccctcttcggcacagagtagatgccggtacattccagtcacgctgggctccctttggtggaaagggttcacccagcttcttagatggaggcaggattgataccacttccctctgatagggtcacccctaagagtgacccccgactgcatgtttctttccatatcatcttcttcgtcccatagatgcccagaatcccgtctctttggggtccccagcaagtgcactgcttcctataaaggttccactgggccctgaaaggagcttctagaagtatcgggtgaagatgagtctctggggttacttccagagtgtagacagtcttttggccagcagagccagtaaagttctgttgtttgagctccaccgggacctcaggaagagaggaagaaggtcaccctgccctgctcaatggctgcttccttccagaagtaatggctttgacattggatttccctcttcacgcctgagagttttgccccatgatgtgggttgccagcctggtatcacccttccttcatgttctccaaaagactctgcttccctgctcctgccatgataatgatagccttggcgacgtggcgaagacagccaaagcccagaggctcagagttcagtctgagaagcacacccggaggctggtccccaggccacagagagcggctgtagccactctcactgggtgggaggccaccctgggggcaaactccactctgtttgtcagaaaggagtctccacgggaggacctggctgtgatggcaagagctctcacctagggaggaaacagacaaggaacagagcagagggagagacattgtgatggctgaccgcacgtgcaggctgtttgcctctgtaagtgctgatgaaacgggagccaggaacacaggcttcagccctagccgtgtgaggtttgggcacaccatgctgttccggcgtcactcctccctgcctggtatatgatatcaacagtcccaacctgagatttccagctagctcagctttcccggggaccttttggaatcttcaggtctagagtgcctttccactgtacctcctgagcagctatcctcaagaggaaatgcctgccttctgggttcctctttgggctctgcacttggccatggtcttcagctgtcactgtccccaagggttccttttcccattgtttctagcctcttacagatgccatctccatggtcaccctcgttcagaccttctacatcccttctctttgtccttatccacagccttctctctgttccctgaagccttcatcttgcaatggccagtgggcccatccaccgccatagcctgttagcctctctggctcacctgaggccagcgacaccaaggcctctggtggtatcgatgtgttgccaggtcctcgaatctccttagtgccaactgtcacaccagccttccatctgtttcctagcttttgatctctagtgctgcccttgtcccattgtaggtgggagatagatcaacaaaccaaagtccagctctggatgcttcgagctctgccagcttgcccagagtggtataaaacctggcaggtggggccccttgccagcccccctcctcctgaatagtccaagacgtcaggtgagcgataaatggtaacatgggtacaccagctgttgtccccagcctcctagttcgaggctgctctctgttccaggtgcttaagtgagcccagctttaatcaccaggtgtgtagctgctcctgatcacagcagtggggacttactggccccaccctgggagactcagtgttcttccctatgctatggtaacgatgactgaggacataagtgacaagtagccaaagatcatctcctgctcacgtgtggcatccacagtaccctgatctggtaggtgcttgaagagggctcgttggcctgccgttgacagatgtctcctggcctgggtgctcctccgtggggcttcattcatctctgtgttcctagcacctggagctctgccaggtttggagtcatctctcagtaagcgatgttgagtgagcagtcgctgagtgactgtgtttaccaaggaaggacttgagcccagctgccgagaccaaaccctccagttgcttatcctcgcaggcccagactcaggcaaactggaaactcagccctgccctgggctccacccttttcccttcagcccctgtaatgtgagctaaagttatctctgttcccgatggatccagaaaggcagatagatataagggatggagagaggtccgaggacttcccatgactgtgaagggcagcatctaggttccctttgtgaactgacagccatggtgtcactcggaaacagccccttcttggtcatacggtgctgggaaaggtgtagttatgtgcagagggccctgtgtgttccagatcagcatggattcttaggaaaggtggcggcagatgcatcatgggatttctccctccttgctctttattgaagcttcctgccatggtgccagggctcacacagggcccgtagagactctagaagctgagagaaccctggcccaccagactcagctccttcccagtcctgagctttgtcctctcccttgtaataatcagcagctctaatttccctaagtggaacggcgatacttgggttctttttgtccatttctcatgattttcttctggcttctagaagtttccatattgcccaggaggtagagttctactggaccaaaagtgggttgggcttctgtctagcattgcctagaagtcagcagacagaatacctggttctgtgcccttatggggttttgggaaaccctctaccttcgtctccctcccaatgcctgggcattttatttcatgagagcctaggcttttggatcagaatcttgtggttatctctgagatcaggtgggtggctacttatcactgtaagaaagagaagggcaaagaatccggtgctcccaagaagagtaagactcatccaaactcatcccaagactaatagatgagccagagaccttctccctgtgctgtggcctggaaatacactctgtccactctgccaagtcccagagaagcttctgaaaatgtgtctttatcacaccctgggattcacaggaagggacagagaaagagcttgttggcatcgaggcaggggtcgtggccatggctgctgacctttccaggcaactgagcttccccgtgaccctagctcagaccagtgcctttctgaaagttctctgaaattaagggattcagagttgaagagatggctcagcggttggggactgactgcttttaaagaggacccaggttcaaatcccagtacccacatggctcacagctgtttataactccaagacctgacactctcacgtagacatagatgcaggcaaaacaccaatgcacataaaataaaggtaaataaataaaaacttttatagaaaaaaaattgagggattcaggtagactcggtcctggtcatttcagctattactaattgtataaatcagtgcattaggtaagttccaatgtcaggcaactaccactattatttctagaacattctcttcatcctaaacagtcattactgtggagtatgagcctacgccgagactgctggatcctgtggtatataacaaattctctttttaaatgttgtatatagaggaaaaggagggagtttgtgcttgcatccgtttccaaacaaaaatagttcaccattaaggcagcctgaacttggtgacacccccaccagcattcaccatctccctaagctctaagagcctgttgggaagctcaaaacttaaaagcaaacaaaacaagctaggctgggatacagagaaggctccctggtaggatgagcctggtgtaagcagacagagccagcctgatctcagcagggactcagtcatgcagagggatggcagagtctgtgggtctctaaggctccaggacacctctttgtaagtccctgcagcagctaagctgccctgagttctctgactagagatgctggggctagagatgctggtagactgccttctcagcaggcacaaaggcctgagtttgttccccagtactgatttaaataccataaaatcgtgagaaatggacaaaaagaacccaagtattgcctttccacttagggaagttggtactaaactggatgtggtggcccgtgccaacaatcctggcactcaggtagagccaggaggctcagaaattcaagatcatccttggctacgtagggagttcaaagccagcctgggatacatgaaatcctgtttctaaaacaaaaacaaaacaaaaaaagtctgtatttcatgaaaagtcttatatatgtatatatacttctacatttgaatgaagtactaacaagccacgtatgcattctttcggaactgctgcagatcttttctccattttccttctaattaattacatctgtaagtaaaaaaatatgaatcaacccattggaatggttatgtcgaggttggatgagcacatctgcagtcctggtactcaggtgtctgagacaggaggattgcaaagccaaggcccgcatgaaccacagactatggccatgtctcagagcaacaatatcttgggctgtagtagctcagcagtagagcccttgccttagcatgggtaaggtcccaggctccctctgcagccaggaaaactgtctgatcttgtcaccatgcacacccacccacagccctttgcagaacaggtgacaaagaactgggtgtcagtgggaagctgacagggccatggggatgtttacagtctggcctaattggacagtggcattggtcgctatcatcagcctaagccttcctgacatctatggctcatccacctggctgcttgcgtctgcctgggcctggatggtaggtggttgggatgaagacgagctgtccctggggctgaagacaacagaaccttgggtagagcagggcaagtcggggacagaagctgggtataaatagtccctgcccagctgggcaggcctggcaagccctccgtcctccccctcaccagctgccagtgccagccatgccccgacctcctttgggagcctggtcaccatctcagatcctcactggaggaagtccctcagcggaactgaggagtcttgtcctgtgtgtgggcgagacctccggctgcccgagtgggggcatcaggcaggctcttcggggtgtcctctattttcttaactggaaggccaagtgtgctggtgtatgtgtgtgaaaaatcaatagctattcctctttgtgtgtgtgtgtgtcatgctgcaaacaaatgagccagccttctgtggtgagaaggggagaagagggtacggggacactagcaaaggttacttctagcttgggagctcacagaagtctttagaagtgattcagggaaagtttgacttgggtatgggctgcagagaggcactcaaggagagggctcagcatgcgtgaagggtgtgaagctgtttcagctggcctcaaggcaaatctaatcaaagcctctcacagtggggagatggagaagatcaggagcctctcctgttgactctcccaggggcacaagctcttctgtaacggggacaagaagtgggttacactgatatgtctgcagcaatggaatgtcagccatggtgtgtgggcacggctcagggccggcagggcatgtcaggggggacagctgtcctgcagaagtcaatcccaaggccatagcctcaaggctgtccatagatctgagccctgtccccagaggccctagctaattaccacaggatatccagatagagcttgttgagacctctgaccggagcatcctggaaaccctcccatgccccttggtcagtttgaacatgcatccaagtcacacatggctttgctacgctcagcctgtcagtcacagagggatttgcttggccagccctgtcaggactgctggtgaagagactctgccgtgtcttggagccttcctcctcgtgcttgatgggaagtggctttagaaattctgatgtgctgtatcaagtcagggaactgaggctccgggaaatgaggttggcgacccggcagggaccaagtcctgagagcatggaacctgaggtggctgccattgcttgagggatcctgatgtgcatggcactgagctgtacatgtttactcttcccgcaagctctgtctcacagtggaagaaagtgtggtgtggagaagttaaggaaatcgcttggattggcagcttgaggcaggcagagcccgatgtgagctggggtgaagagacaggcttggaaggaggagggaacctaactctgggtgacaagtgtctacactgaagcccttgctggggtttcctttctagtgtcagtagggcttagggatgagtggcaggccagggctaagtgctggcttagtgtgtgagaatgagcttgatcaacaacactgcagagaaagggcctggttgggggcaggggtctgtagggaaggaagagaaaagacaaaagacatgccaagagggaggctcaactctggcactttacgacccacaggtccaggcagcttacttagctcccttgcctctgtttccccgtctgtgaaatgggatgatattgatgatgacactctctttacctcatagactggttgcgaggattaaatcagttaaagacgtaaacatttcaaactgtgcccagctcaggtcagatatacatccatgttaggtgtttttgcggggctcccctatgcctttatgtgctgtgtggcttcaggcgctaggctcaccattgtttctcactcaaacgtcagcccaccagcgggtaggcaggccaggcctgaagccacccagctccctagggacccagacaagcattgcccacgaagcagagggaaggcttgcctgggagccaggtagtctagtttctaacagcagatagaaactctataatctgggcagctagtaaagcccccactgtgtgctgggttgttatcaagcaactcaaggaagttagtgaagagttggtagtgagccgtgatggtgtgacactaatgcttcagtggtcacctcattctttttctctcactcttggccagtcccaacaggagacagtctcttgtagcccaggctagcttgcacctcctgaccctcttgcttctggctcccaagtgttcagggattactacccaccttcctagctttcccttgtcaaaagggcccagggctctggttggggagagctcagtgggagatcagttgtctggcaagcttgaggctttgagaggtggggttggggactctaagctcaggacaaggttcttcaaggccaccaattcaaacccccagttctgcctactcgcactctctcttcccagtggggaaacctggacttcatcccctgacagctgaggccagaggctgctggaagtggtgctgctgtgtgccatgttttgctggagcctctgagcagagcaaccgaggctctgggtgttgagtgtgggggaagggtgttgggaggcagctcacagcatactctgattagactctgatgagccatatacctgttcccaagaagcctagggcaagctagtttgttctggaaacccagattcctcatcaggggacagagatgatcaaaagctgatcaagtctgttacatccaaagttctaagcaactacagagtccctcaatggccgcgttcggttcacccatgccaacgaagcttttgtgtctcttctgacctaccccagagtttgcccctggccctctttccaaggctcctgcatccaggacttgaccttagctagtgcctaggtctccttcttccaggacactctgccctttattatgagcctggaagagggaaggaaaaggtagagtttctggtagtgccttgctttttctacagtagttaaccctttcccccccgagtgtacttaccggcgctgtaaaatcccaagggttgaaatgtaagaggtacaataatggggtggcttgactgaagtgagaaggttggggggatgcctgctgagagtttccttttgctcttgagttaaactagtcatcaaacggagcctctgtcgctagtgagaggggaggtggcactctagaaacttctagggaactataaagatggtggcggaggcccttgtagacagagcacttgatgccatcagagacaaacaggctcttggtgtcctctgtactcttggggaagaggctaagagggctttgtggggagagagagagagaggggggagagagagagagagagagagagagagagagagagagagagagaacactgtgctaagacttatgctcccccccccccaagatggagctgtgatcacaatggcctctgcttcctttgtcctttatatttggattccttcccatgaatggctgttagtctccacatgacccacgaatcctggagtccctgggagattgctctgcaggagccctgccatctctaccagggcaccggggcccaggcactgggcagaacttgattcctgctccaattcttcatttccaacccagggttatttttgtggcacagtacagacctacacagtgccccctcccccagaggctctgctgctccacatgcccatgtcagagggacactgcttgaaccggtgccgtgccctttgtgggacaccgtgtccccaaggaaagtcagaaagcagcacacaaggtgccaggcttctcagagccacggatcatccctcccccaccccagcccatcctctgggaagaagtgacatccatactaggccacgtgttctgtgtctacagtgccatctccattgtctgcctgcaggtccctggccctgggccagcagtacacatctctggcctcccagcctctgctctgcggctccatcccaggcctggtccccaagcaactgcgcttctgccgcaattacatcgagatcatgcccagcgtagcagaaggtgtgaagctgggcatccaggagtgccagcatcagttccggggccgccggtggaactgtaccaccatagatgacagcctggccatctttgggcctgtcttggacaaaggtacttgcctgagactcggtgggaggtggctgggagactgggggtggtgggaagggttctggggaccctgtccccttcctcccactgtgggaaaccctgagtccaagttctccctaggagggtaataaagctggtggaaagtgggtggggtccatctctggacaggacaggctgtgtccacatcggctacatcttttctagtgctacaggggggtgggtagccctgaggtgccccagtgtcctgagattggagggcaggcaccaaggagcccggagccttccttcccggatgacacagtgggggcccagtctttgatgtagacatgtgtgacatttcccttatgctgtgttaagtgctatgcaaatacagcttgggggtgggggtgggatggtgccaggcctaggtgttgtgccatggaaaaagtctctatgctctgtcaaagctgtctggtgctggtagcactacatgacccccgagggtcccctgagagttcctgttggttcccatagcctgaaagcaagacgcgtccattaaccctgatgtcctgtggatcacgctcggtgatctggaagtctgaccagctgtgaccctagtggatgaaagccggcttttgactttgcacatggggcataggagagggttgaatggggtaactgctcctaagaaggggactttggctctagaacctctcctgtccaggaatttaacggccttagctgggctggcctcgactggagttttgccagccgatgggggcgagcctgctctgagaaggttcgtaaaagctgcattcacagccaaaagggaggagtccgagagctagcgggagggtgggcgcagagtttgggagaggggagctatcccccctcctttggagaaagccctctccccctttacctgtgcttcaagtgcaaagtgtctgtacaacctacaggcagaaaacgcaggctattgtcgtgggacaggagggcaattagcaaatcaatggatgatgattctgtttacgcttctaataccaaagctaattattccttgtttacataaaaggtttggcctctaattggggccaagtggcggcggcggctggcttttcaaaactgatctcgcccgcctgttggtctcaccgccttccggcgccccacctcagtccaggtagcgtttaatcaaactgccaggcgtcccgacgcctcccccaaagcaacactggccttctgatcactcctcccacccaggatagtgtccatcgagacctttcagcatgatacccgctcgcagtgggtctgatgtttagattcgcagcagtgggttgtgccacatgcctccgtcccacagcaagagggcagtttgtgtcccagtgtgcaaggaaatatggggctgagacagtgggatttgatgaaggcagtggggtgaggttccaggaagatgtacccgcgtcccggtaccctgtgggcaggcggtgggtcctggccacttttgcgcacgtcctagcaggtgcggggtgggcggccggaaggcgcaaggccgcggtcctccgcggctccggagggttcgagcgccgccccccgccgcgcgcccgctgcggtcgccgcgcaattcacacgccctctggccgccgcctcccggggatcgcgctgcccggcgccggggctgggggcgnnnnnnnnnnnnnnnnnnnnnnnnnnnnnnnnnnnnnnnnnnnnnnnnnnnnnnnnnnnnnnnnnnnnnnnnnnnnnnnnnnnnnnnnnnnnnnnnnnnnnnnnnnnnnnnnnnnnnnnnnnnnnnnnnnncccaggctaatccccgccccgcccccgccacccccactgccccggcgctgggaactgagcgtggcggggccgggtcgccggaagccaggggcgccctcccctggggcgagagggccgggaggcctggatcaccgccgtgcgcagtcccccccggcttggctggactgctgagccagctctcgctccgcgctccccgccgggctgcgggaaaagtgggacgcgcccctgctgtgcaggtggcgcacgagggcttcgtgtctgcaaaggctgctgtggctactgagtatctggttccctgcatattcagcacgggccacgacctaggaaaggagatccggctctgaccacctgtgcagtatagcacgacccgctctgggaacctataaaaagagatggcccgggccgttggcctcgcccggccctgtctgtaaaatagggtttagaacattgtagggaataaagcacaggaaagacagatctgcgcgtatgcagtactcagggagtggctctcattgtaacaaggctggtgatgcccgctgagactctcatctctgaaccctgggcctgaggccgagaaactgccttgtctcgaccctcgtggcttcgtaggaggagggcaagaaatgggcagccatggctgaagatgctgcacctactttacagagtgtactgtgaggcacagatgagaaatctgcctacggggaactgaggttcgagtggaacgagtggattagtaggttttaggctgcaggttccagtctccagaatggaggactcagaactgttaggaggagtgtttctgaatgtgcaaggttggaggccaagagcccaaggacagggcgtggccaacctaactcttcagagagcattccggtcccaccatagacccctccatcttagtagccctgcagctctgaactcagcttgcccatccacaaagagaatactaactagggtctgaactctttagagcaacaggagggcacctggctctcttcccccaatgactggtgagcctttgcgctcttccccagccctcagggcaaggctgtgtatgtaccctaaggctccaggctgaacatcttctcacaccatccctctgcagccacccgtgaatcggccttcgtgcatgccatcgcctcggctggtgtcgccttcgcagtcacacgctcctgcgctgagggaacctccaccatctgcggctgtgactcacatcataaggggccacctggagaaggctggaagtggggcggctgcagcgaggacgccgacttcggggtgctggtgtcccgggaatttgcggatgcgcgggagaacaggccagatgcccgctcagctatgaacaagcacaacaatgaagcaggccgaacggtgagacagcgacccacaactcgggggcgggaggcactccctggacccctgccttcacggccaggttcccatccacaccccatagtaaccccctgaccaccctccttcctctcttccagctgtcctttgaataggttttttaaagtatatttactcattctcagtgtgtgtattccatgttgtgtatgtggaagtcagaaggcaacctgtagtggtcagttcttcccaccatgtaggtttccaaacttgaatcatgcttgatgctgttcctggatcttttgagaaatctgccaaggagtgcagtatggctgccccataggaacaacacccataggctacactggttggcaggctgtgcctgtgtacgtctgtgatgtggttgtgggttggggactgactctgaatccaaagtagggtttccatagcatagcccttcctatgctcgtggaacacttagctctcggcctcagtttttccatctgttcaatgggaataacagtccctagtttgcaccacttctatggatgaggtgaatgtgaagcctgctggggccgggggtgtgactagggacactggtttccacccattcttcctggcaccaagtaagagtagaggagggtgtggtacagaggggaagctttctcccggtgtgtcagtctgaactagctgctgcccctctttccctagaccatcctggaccacatgcacctaaagtgtaaatgccacgggttgtccggcagctgcgaggtgaagacctgctggtgggcccagcccgacttccgtgccattggcgacttcctcaaggacaagtacgacagtgcctccgagatggtggtggagaaacaccgtgagtcccgaggctgggtggagaccctgcgggctaagtacgcgctcttcaagccacccaccgagagggacctggtctactacgagaactcccccaacttttgtgagcccaacccagagacgggctcctttggtaccagggaccggacttgcaatgtcacctcccacggcatcgatggctgcgatctgctgtgctgtggccggggccacaacacgaggacggagaaacggaaggagaaatgccattgcgtcttccactggtgctgctatgtcagctgccaagagtgtattcgcatctacgatgtgcacacctgcaagtagtgagccaggtagggcgcggggcgggacgtgggactgccctctcctcccatccgctaggcctgctcttctgattctcggcttcccaagacgaacaagttcccaaagctgaagtcagaaactaggcttcccacgcttccacgggaatggtcttggggagcgacttgacgtatttacacgaggctcagataatgactgagggtgtgcacgtcagccacaagcaattgattaaaattcttacacaaattagcagtgatgagccagaccagatttgttcatggctgctggctgtcattagtgagcatctattcggccagaagagaggttgaggtctggtcccagccatgcccctaaaagtgtcatatctcagggcctcagtttccctactgtctaaaggagaggttcaaatgtcagaaacaggggcagggtatggtgggactggcctttaatcccagcacttaggaggctgaggcatctggatctgagtgtgaggtctggctggtctccatagagagttctaggccaggactacacagtgagaccctgagacagtcacctagtaagtctctcctaaccctggggcagagtcatttcacatcacccatgaactgagagggcaagctttgacctaacacaaatcctccagagcttgggaaggtgggtgggggaagccagatctgaagcttgggtggagcgggagcactctcaccaagtttatggagggagacaggaaagaggagagctcccagttcagagcggctggggtgagtgaccgtgggataaaagcctggtggattatgcttccaagcttcccagaggtggcctgcatgcgtgggaggaccccaagaaaggtcagcctggaagcagagtgatcctagaggctctggcatgggccagtgtgacccttgtctctgtcccctcccctgagagggctctgctagtgagtctgactctcaactggcttttcttatttgtcaaccaacaactctggcttcagcatctgttaccttccccgagcagctgtgaggaacgtgggaaaccacattggttcctggaaaagcagctttctgtccatctatggatggccagcgcagtgtgttccacccagggaccttggagctggtgacacaccagagctggtggctcatgtctgcgctctgtaagggtgggggggtacctgacatcacaagcccatctaagaagttccttgtggggcttaggttccattcccagggtccctctagaaccatacaggaggcgtgggttttctttatcaaggtcaaggctggaaggaagacagcggcgagctttagcgcttcacgcgcccactgctgaacctcgctcctcatctgcgcagtgatggcagtatggggatcttgatggatttttataaagctcaagttagtgggtgtgaatgctgctctaagtgtcagggttgccatcagcgttagcacggggttgctgcaaaggaagatcccatgggcgttctttctgcttttcaaagggatgggagaaaagtcagcaagtaggaaggttgaggtggaaggaagcagaccatgacggccgccttctctggtattcactctgacaagagttagccctgcaccccccaatatcagatagtacatacatagctctggccgttttgaggagctcttggtgtggcttcttatcactcagctagaagggccatttgtcctgaccacccatgtcactgaaggttagacttgagttaatggcctagatagacccaggggtctgcttccagaagcttcctatgtaggcttgcataggcctcagcattgccaacccaagcttgatacatggggcagtgtgggtccaagatacagagcccatgactccactccgtccttgcccatgtgggcagctgagatcttccaggcagggaaggaggtgcagggtgagcctttgttgtccagcaaatcgctccactccaatccttgcctaaaaatgatctcctaagaagaattgggtgtagctgggtagtagaacacttacacccctgaatcaatctccagtactggggagaggggaaagcagccccctttcctcacattcctaaggtagacacttgctgtttttctagtatcatgcagacatgtttttaagaagctatgcccacagagttcacagccttaatcccttcccatggggtggggggtggaggggggaggaggactggactctcaacctcacacttcctgataagaaagatccctcccactgggatgtcctttgcctctcggagcccaggtttcctcctgtgtgaagtgataaggtctgtgccctgcagggctgctcaggagccagacacagccataaagagcctgctctgggctcctggtttggagccataggccaggagatggttgagacctggttccttcctgtcctttcacccccgaaggcgctgctactgatggaagccaagggacaaatgggcagggagacagcaggcatagaaggctctggcttttttcttgcacaaaggggccacagagcagagcccagcaggccacatgcccttctctgagaagagttcagcacagtggtagcatccagtcctccctaagtggggaagacaccttctccattgcttgaggtttgtccactgtctccacttagccactagcttggtatccgagtgctggtagtttacaaatatctgatttattctttttatccctatgtcggaaaggctatgaatctagtcaccccctctaactggccctgtgtcctgggtctgttactagtcttttgtgggaccttaggcatatccaggtcgtcttgctatgcctggttcagctctgccagcagcaccagagatgagggttggctgggggttggggggtgcctggggcgtggctcagtacctcagatcccacgggatagggctgtacagagtgatcatgctcaggaaagcaccctgggagggagttcaccataactaggtagagtccgtttcttttggacaattcacggcagttgtgcgtctgatggcaggcactagccctgctgtgactggtggctcagactggcaggcttttccgtctccacgtaggaagggcaatgctcccttggttacctacagtgggcttcctcagctaggaggaggtttgagttgtgtggatgcaggctctgttcttcctgaggatggcatgtcctccctcaacagcaggctctggggcgaggagggaggcagggctggcagcgtaggcagcctgtgatctttgcatcccagggggtgatgttgacagcagttatgaggtttctgattcttcctgtttatttcccaaagggcactgggaaggggtagattgtgcggctggatccattcatcgaagtcccatgagaagcaggatctagatccaggccagccttcggcactggccagcaaggagcatggactgttgccagctgcatgtgataaacgacctggacccagccggcctcggacggacgggcggcttctttctcaactaacgtctctccccctgctctggatggtgtacggctttacagaggggctttctttatggttttaccagggtctgctggggacagactcgaggcttacctttgcacatgttaaagaaaataaaaatgaaaaaaaaaaatctaccgcaacagaacaggctgggctagtgtgagctcttggcctggtgggaaggacaagaccatggcgagattctgtgtccaagctgcctctactcgtgacattccaagatgcctctgaggtgggaactgtgaagtaggacagagccccgcagtcccctcttgtccgtcgactcccatttaaattggacataccttgtcgttctgagaaaagccatagataggtgtagctgggatgtagtgatggggaggcccctggccaacagtgggagcaagatcttgagttttgaagacctcagagttctgggcggcctgggaagccatctgcagaacagagttccttgtgggctcctgttttcgctagccctgttctgccctggagcgacagtcagatctccacgcccctttctgttgttctacagtgtccacctttactacgcgttttttttttttttttcatgatgaccttgtaaataggtcagatgtggaggcaggtctcttctggctccatccaccacacccagaaagaatgggctgctctgcccttctcagccttgctaaccagcagacaccgaggagagcagcggggcaccttagagagcaatctaaacatggttggcaggtggggagggtaaagagtcccacttcctttgtgttagaaggcagactaccctgcgtccttttctcccattggctgaagtaaccagaaagacaagagatccttaacaagcccttcttcccacttgtaaaagggatagcctatctcagttcccaaggatctggattagatagatattcaaaagaggcaagcagcgaatggaggcagctcccagctctgttcccgacgcatgatggtactggctgggtttagtaaggtgggtggggctgcacggatcaatccatcaactccgtcttaaggagaatcagaaagaggagataaaatgggggaatggggcagaacaaagaatttgtcctttcccgcttctgtctagggtctgctaatgctggcttgacgaggggtcagccacttctttcctgttgtgcagttggcttgccaagcaggctccagtaggcccttgcctgcactctctaccatgtgaccatgagcactgctctagggacacctcccatcccttcctagcaccccaaatgccccttcccatctctccttccagaagttggaaatcaagtcaactggataacgcttgtgtgaggacacttgagcagaacggatacaacaatttacaagtctcttcatatctatgtattctatattaaaagtgataaagtcatgtttccggggcgtattcaagtagctgacaagtaattatttaataatagtacatgagcgcattgtaattatcctcgccatagtcaggtaatagcatccaatgggaggtccctaccaacctgctgtatccaaagttttgtaaaaagttgtagaagttgttgatctttttgattttatattcaaaaagtctctttttataaatattatttattatacaatgtatatacctttgagttaactaagattatatattatataaatatatatatatttggagaaaatctatttcatcatgcagtttttttctgttaaatcattaaagagaaggtaaacttcaaatggacacattgtacgatgtgtggagtctccagattcgtccttaggtcaagggtatctgaatgttgtgctaattaaatggccaaatttacggtcatttcctctgctctctaagcaagatgaggtatgatggacagcagatgtgacatgagccttaaagcattacttgatattaagtcagtatcaaacaaggaattgccaacttggggaagaacaaacctggtcagcaattcattcatagacttgaaaaatttcaacaacgcatgttgatgtctcagatctttctacaaggttcagcccaggtcagtgggtcacagggcctgccatagtcttactccctttctcactacatacccaactccagttgttggagaaataggaattgctcaactgtaaacaaagctggaccagaaacagataacagctgaactgtggaagaggttggtaggtaggttgaccagatggtgttctgcctgtgctctgggccaagtgacaatggaattgtaggttggtttagataggttgctgggcagagctctgggaagggcactctctccttgggctggagtttcagtgactcacccgaagcctttgcctgtcatcttgatgctgtgcagttttaggatgatgggtggtccttcacttctcagacctccctctaaaatatccccttcagtgttcctttcttctggtctaccactattagagataacgtattcacactggccataggaacatgaagcagtctgcttctgacggtggggactgccaacaccttctggccctcggttgaccatgaccgcctgagcttccatttggtgcatcttttgcccctagaaatctttttccacctatgtgaggccccttgagggtaaaagcagagctcctggcttcagtgctggccatctttgactgcatttcccttgagctgaatactcttttttttttctcgcagcactctgggttttattttattttatttatttttttgactgtataaggttgccaagtatttagatggtccctatcatacttaccaaggccatttgtctcccatgatcattgtattccattaaagagagtacaatttatagctatgctagaacactagctggaaacactggaaagaacaagtttcaagttgtgcctaagtcgtgtgtgcaccttttaatttcagcatctgggaggcagagacaggtagatccctctgttcttggcagccagtgctacacaccagacttagtgggtcttaaaaaaaaggttttgagaataatttgagagaagataaagggatatggtgaggttttttttttttattgaaagcaacactattctgaaggcaggctgtgggtaaatggatgggcacagagataggaaaaggaatcgaggagaaagacagcaagggaaacgaggcgaggctgttttgggtggagtgctggtcgacctgtgtagtgctgggcataacagcacgtaacatgggtggtgtgggtctacattaggaagtgagttcagcaaaacgtatggtgttaagccatgactggcttaacagaacttgggaggcaaacagctatctcatcactaatcaatcaccaaatgttcattatggagactgtgctggagaatcataaatacatgtcattacaatttcttgtttggacatagtctcactttgtagtgctggctatcctggaaccatgcagaataggctggcctcaatctcgtgctgatcccccttcctcgctacctctgggattagaggtgtgcacccttcctcccgatcttgggattcctgcagatcacaggtgttatccgtgctctggcatcacgacacactcacaccccctgggctgtcactggggctcagcctcagcagttgtcagcaaacgagtggctttcatcttgcaataacttctaaaatttaaatgctgcttttgaactcttagcaaaccttgcctggcttcacttatttgaaggcggcaggcggcccagctgccaggcaagcaaactgaagtcctggccttgccttctgtttggccaggtggatatttatagctgaccctgcttcagcaggcctgttgaccaggctttgattattaaatgataactgaatctcctccatgattctgtaacataaggtgggaaatgtaaaggctgctcactgtaatttttaggcaataaaaagacagccttaaaaacacatcttaggctcgatagatgccccagtgttggggaatcgagggcggggaggtgggagtgggtgggtggtggaggaacaccctcatagaagcagggagagggaggatgggatagggggtttctgggagggggaggaaagtggaaaagggctaacatttgaaatgtaaataaagaaaatatccaagaaaaaagaaaaaagtattcaaaatatatacatataaaaaaaaaaccacatcttagattctagctacagttatgcatgtttttggatagtacatgaaaaaaaaatcctcaaaagaagacaaaaatgtagtaaggaaaaaatgagctcttctttggaagatttagtatttcctgacagccggtgtgtgtgtgtgtgtgtgtgtgtgggggggggtcatcagagccctccacactgttcacagggctatgctgtgggctggaggtaggaaggcctttggggatcctcccagaactggaggtgggggcaactgctgtcccccaaattgctggacatgcctcttctctacacagcatccatttctgggcttcctggtgcaaggactggggctgtggcatctagtatctgagagatccagaaggtatgaagaacagcagggtgagctcgggggtctcaggtttgcctgcttcagagaagtcattgtaccgcaaagcagcttccacccagctcctgaacaaccgagctcatggctgcagttcagactttttaaggtaaaataggtatcaaacgtaaatatgaagattctcgtacattagcatatactaatgaacttttgaggggtttgttttgcttttgtttttggagacagggtttctgtgcagctctggttgcctggaattcaccctgtagaccaggttggtcttgaactcacagagactcacttgcctctacctctagagtgcctggattaaaggcatgcgccaccactgcccactgaactttttgttgttgttgttgttgtttgagaagagtctctctgaatgaatggttcccaaccttgctaacgctgtttgcctttaatgccgctcctatcatgatgaccctcaaccacaaccttgcttttgttggtatttcataactgtaatgttgctcctgttgtgaattgtaaggtaaatacctgtgctttctgatggtcttaggtataacccgtaagttgagaactactgtcctacagggtcttgggactcactatgtagagtaggctggcttccaactcagagatctgtctcccaagtgctgggattaaaggcatgtgccgtcagcttgcatgcgtatctgtgtgccatgtgagttacagttgtacactgccatgtgaattctgggaattgaactgagtcctctggaagagcggtaagagctcttacccactgagccatctctccagcctccttaatgtttttctaaagagatttaaaaacaaaacaaaaaaaaatctcctatgctgtaacaaagcaaggaggggtttctcttctgtggccacttcgtcatgcagccccattagtgattgatcctgttccatataaaatactggtctatacaatatttcaagtatatttactctttattgcattccttcaatttgcattacacaatataatatctttttcaatataattttggacaaaaacacaagacattaacttcgttgaacaagaaacataaattaattcatgtacgactttgttgggaggagaaaggcagaaccgcagacaacagggaccacggcggtggacagggaaccacggtactagccacgggaatcacagtttcacaacacaattcactctttcaaagccacaaaataagccagggatgaaaaccccaaacaaggtatacagacggcaagactaggagatgatttgccttctactgtggggacagtgtcagagtatcacccaggtgcccctgcggcagcaagcctcccgggcggcttctgatggctgtctttgtgtttgaagcagcagcggggagagtggcatgcgccctaagactcatctccacgaatgacgtgacgacctaattgcattccttctaacccactgattaggcaaaccaccctccaaagggctcgctgagttcctcttcgggaagaggtgtgttgagtacgctggaatggatattcgagggctgagggagaggactagggggtggcttgttctgctggagagtagtgttttatttatgtgctgcagacactacagatcacttgagatacaaggaggatgaattgtaagtcatcaggctgaggaaaaggaagacgatggcactaataggcctctaacgtcatcctaaggaactgacccacttagagccggacgctaattagaattgagaggcttgtaaattattttaattttttttctgtttagggatgtacagatttccatatgtatctttcataaggttttaacggcatctaccaagtggcaatgattagcatatctcttaccacagagcaaattaattacactcagagcatatcacagccaccccaggaatgatttgacttccgattagaaaagctnnnnnnnnnnnnnnnnnnnnnnnnnnnnnnnnnnnnnnnnnnnnnnnnnnnnnnnnnnnnnnnnnnnnnnnnnnnnnnnnnnnnnnnnnnnnnnnnnnnnnnnnnnnnnnnnnnnnnnnnnnnnnnnnnnnnnnnnnnnnnnnnnnnnnnnnnnnnnnnnnnnnnnnnnnnnnnnnnnnnnnnnnnnnnnnnnnnnnnnnnnnnnnnnnnnnnnnnnnnnnnnnnnnnnnnnnnnnnnnnnnnnnnnnnnnnnnnnnnnnnnnnnnnnnnnnnnnnnnnnnnnnnnnnnnnnnnnnnnnnnnnnnnnnnnnnnnnnnnnnnnnnnnnnnnnnnnnnnnnnnnnnnnnnnnnnnnnnnnnnnnnnnnnnnnnnnnnnnnnnnnnnnnnnnnnnnnnnnnnnnnnnnnnnnnnnnnnnnnnnnnnnnnnnnnnnnnnnnnnnnnnnnnnnnnnnnnnnnnnnnnnnnnnnnnnnnnnnnnnnnnnnnnnnnnnnnnnnnnnnaaaaacccaaaccctattcactaagaaacactcgaggcttcctgttctctctacattttccaccatttgtttgctatttgatgggcactttctaaaagaaaatggtcacattccgggcacttaaaagcaggttccagtgaatcatggaccatcaagttttctctgctctgtgacaaggaagtcttgtgaagcaagccaaggagagcagaccaacacgacagcctgcttccttgcttggtccctcagacccacagcacagcgaggggctagtgcgtgaaaacaaggctatacaggaaggaaggaaaccatcagcgggctcatatgcgctggggaagacttgggacctcgcagatgggtgagcactgcgtgtacttacgcgccttcttctctcatgagggccaagaatttcctcacacggtactcaggatccatctaaaaagcatcggaagaaacaaatcagacgcgcgaagctgccttttctccacaatgtgcttcctccgcaccagggaggcgcgtggtcatgtgcttcctgggtcgttcagaaccatgtcaccattccctagttgttgtttcgaagcataataaagtgggttatgttatttagaagccagtggaacttcccaacacggagaggctactggtcactcacaggcacctcagccaagcaccccctgcacccagtgtgttggtgtgaggaggagaagcacaccagccaggtgtcaccacaacactagatcgtggtcactcacggaggggtccagacatgcctgggtgcattcatggtgctataaatcatgagagtttaaatgctaaaattcatatatcttattgaaggaggaggatagaacctgagaaaccaaactgaggttgattaagtgaccaaaatacagttagaactttttgttttgtttttcgagacagggtttctctgtatagccctggctgtcctggaactcattctgtagaccaggctggcctcgaactcagaaatctacctgcctctgcttcctgagtgctgggattagaggcatgcgccaccactgcctgactagttatgactttcacatactcactgaactggcattcttagctttagtgcccttctggtgacgctgccacacctaagagagcagagagtgctgttggcctcccctctccgtacacctggcctctggtagcccgagagtcacagactcaagacaaggtggtttgatccgggtgatggttcaagtcaccattactaattatctctcctcgctgtcattctggatccaagttacttcacttcaaagtgtatcatagtcttattggcctgactagggtgtgtggggatctggaaaagaataatcacaaacaaacatctctaattactcactatgaatttgtactgtaagaaacacctcacttttaaagcatgttgcagggcagaagtctgctggcaagagggaactccctgccctccaggagtggctgggctcgcaagggctcagctcgcgcagccgtgggcaagagtgcactcagactcccctccaagcaggctggaaaagcgacagttctgtcccagcaaaacatggaacgtaagtttcaaatgtatcaaagttaaggggtcagactacaaagaactaagaaaaagtgtgaacagctaacaaaagagtcattttttttccccctctatgggactagaattacacatgaatcaattgtcaaagctttttctaaaaaatggaactggctggagctcgctggagtcagtacatgcaggtcttcgcccattaactctatttaatatgtgtgaggagcgacttactgacttgcctgtagctatggaattaagagtcaagagaaaggggaggaaaaaagcaacctagataaatgactttattccctcaggtgacatccagtcagagcacatccttaacaccgagcaagttttaacaaaatcgagtccggcgagcagagcgagtgagcatggcttccattctgctgaactgcatgcctctccactcgggctctgcccctgctcctgaggcagatctaaagagaagtcactcagctgctcggaatccatttgacgtgaaggggttcaaactccaggcctatgaagtgtcagtcgctcaagattaggccgagcgccccactctcactttctacctcacacacataagtattaacttgatcactgcgccgcaggcatcaaagggagaggaggcaggggtggggaggaaaactcgcatagtttctcctatgcaattattttaaaagattgaactgaaactggaaaaagaagggcagagctgacttctgacagatttatcttttttcggggacaaagccaatacacctgtatgtatgcctttaccaggaataagcctgagcagggtgcttagtctatgacaataatttactactcataatggaaactatataaattgacttaaaaacagttgctggaagcttgggaaacttttggtttctgaaaaaccacaaaaatctaattttaaattgagtttatcagagagagagttaagataattctctccatatttcttatttattggcctaagagcttccttcagatgtgaagctggggaaccccaatgtgagcagtgggcgcgcagggctccacagtgacacacctcctcaggtctggggatggctcactcctcattcattcacttctgctcctttcattgtatctagtgaaatttattgagctctctaatacgtgctgagctggtccaggggccagcgacagtgtgtggcagcccaggggtctgaacacacggaactcagtctacacaagtgtattatgtacatgtgtgtgtacacgttcgggcacacagaggcaaggcattccagaaggagagagggaggtgcagtccacacaagaaagttccaaaccaaaatcagtctcatctgcctgtgcctagcagcaggctgggagtcagttagtttgagatttctagggcactgggcatggcggtatgagcctttaatcctagcacttgggaaggcagaggcagggatggtctctgagttcgaggccagcctggtctgtataaagagctccaggacagccagggctacacagagacacccgtctggaaaaactaaaataaacatttttttaggagttcagtgaggggaaacgcacagtcacagcccgatctgcacaagtcggccgcatccacacttccacatctcccagagctcttagccatcagtgctgtcacatgctcaccctgaaggacggagcctcagtagtgagagagatcggggcagactcactgacagactcttctcccatctgcatgagactggggacaccttgcttccctccttcccttccagccccctcttcatcttcattgtcatcctacaacatccagtctcccctcactgaaggtaaagtttaaattatcaccaggattttgcacatctccttttattgctaagtgctgtagatgtaagccctatcctaagctgttcagggtctcactccttttctctgattgttaataaggactatgaaattgactgtacccaggtcacctctctgcagcctccaagatgttgaggagcctagggcaggggtgggagtgtcttttcctccttgttgaatgtcttccatgacggggcagttgtagttttaaattcgctttgaagccctttctgattttgagacctaatgactctctacattaagattagaagtcacgctctgctctgctcatttatttctgaagagaaagaggagaacatgggtactcctgaggcctgggagaggaaagcaggccctcctggtgtgctacagccattcctgtgactcacgcagagacgggatcgccttacctgcagggacatctcaatcaacattagtaacttcttgattcctatccagactttcttccctttgacttgctgagcaattgtggtgcgttccttatctttgaagttgcccaaaagctataaaagcaataaacaacaattagacacttttatggtgtgcacaccaacattcacctttaagtgaacagtgggaggagctacctgcctgggatgaattgacccacctagtcctgtatgaccataaaagacaaggtcttattctgtagcccagactagcctcaaactcatggtaatcctcctgcctcagcctccgcggtgctgagactacctcatctagaagagataaatcttatgctgtttttctaagggaccatcactaaactgagagacgcgtttcctagggaaaacagctccaatctatgataaatacaagttaaacgtgttagcattccttcctgggcgcagttcgtatgtgtcaaagtacgctggtcttttctctttcccaactacaacagggtgttcagacaggtgacccaggcacacttctcatgctgttggcgtctgctctgttgggagcccacggcaactctgaagttgtggagcctttaggcagcctccccgactcgaccacaccgaataacttacatcaccttttccatcagatcccatctagtcatctgtgcacattaatattaatcaacactcactcgaagactcactttttttaattaaaggctttatcatcttcaaaaaaaaaaaaaaaaaaaaaggaaacatttccacattataaagttgtgaggtttgggtagcgttcttttcttttttctttttggtagttccaaagg

SEQ ID NO: 38 - DNA, 3000 bp, Mus musculus
cctcttcatgatcgccggcaaacttcctcctcggcgctgcttctaatggagccccacctgctcgggctgctactcggcctcctgctcagtggcaccagggtcctcgctggctacccaatttggtggtccctggccctgggccagcagtacacatctctggcctcccagcctctgctctgcggctccatcccaggcctggtccccaagcaactgcgcttctgccgcaattacatcgagatcatgcccagcgtagcagaaggtgtgaagctgggcatccaggagtgccagcatcagttccggggccgccggtggaactgtaccaccatagatgacagcctggccatctttgggcctgtcttggacaaagccacccgtgaatcggccttcgtgcatgccatcgcctcggctggtgtcgccttcgcagtcacacgctcctgcgctgagggaacctccaccatctgcggctgtgactcacatcataaggggccacctggagaaggctggaagtggggcggctgcagcgaggacgccgacttcggggtgctggtgtcccgggaatttgcggatgcgcgggagaacaggccagatgcccgctcagctatgaacaagcacaacaatgaagcaggccgaacgaccatcctggaccacatgcacctaaagtgtaaatgccacgggttgtccggcagctgcgaggtgaagacctgctggtgggcccagcccgacttccgtgccattggcgacttcctcaaggacaagtacgacagtgcctccgagatggtggtggagaaacaccgtgagtcccgaggctgggtggagaccctgcgggctaagtacgcgctcttcaagccacccaccgagagggacctggtctactacgagaactcccccaacttttgtgagcccaacccagagacgggctcctttggtaccagggaccggacttgcaatgtcacctcccacggcatcgatggctgcgatctgctgtgctgtggccggggccacaacacgaggacggagaaacggaaggagaaatgccattgcgtcttccactggtgctgctatgtcagctgccaagagtgtattcgcatctacgatgtgcacacctgcaagtagtgagccagggcactgggaaggggtagattgtgcggctggatccattcatcgaagtcccatgagaagcaggatctagatccaggccagccttcggcactggccagcaaggagcatggactgttgccagctgcatgtgataaacgacctggacccagccggcctcggacggacgggcggcttctttctcaactaacgtctctccccctgctctggatggtgtacggctttacagaggggctttctttatggttttaccagggtctgctggggacagactcgaggcttacctttgcacatgttaaagaaaataaaaatgaaaaaaaaaaatctaccgcaacagaacaggctgggctagtgtgagctcttggcctggtgggaaggacaagaccatggcgagattctgtgtccaagctgcctctactcgtgacattccaagatgcctctgaggtgggaactgtgaagtaggacagagccccgcagtcccctcttgtccgtcgactcccatttaaattggacataccttgtcgttctgagaaaagccatagataggtgtagctgggatgtagtgatggggaggcccctggccaacagtgggagcaagatcttgagttttgaagacctcagagttctgggcggcctgggaagccatctgcagaacagagttccttgtgggctcctgttttcgctagccctgttctgccctggagcgacagtcagatctccacgcccctttctgttgttctacagtgtccacctttactacgcgttttttttttttttttcatgatgaccttgtaaataggtcagatgtggaggcaggtctcttctggctccatccaccacacccagaaagaatgggctgctctgcccttctcagccttgctaaccagcagacaccgaggagagcagcggggcaccttagagagcaatctaaacatggttggcaggtggggagggtaaagagtcccacttcctttgtgttagaaggcagactaccctgcgtccttttctcccattggctgaagtaaccagaaagacaagagatccttaacaagcccttcttcccacttgtaaaagggatagcctatctcagttcccaaggatctggattagatagatattcaaaagaggcaagcagcgaatggaggcagctcccagctctgttcccgacgcatgatggtactggctgggtttagtaaggtgggtggggctgcacggatcaatccatcaactccgtcttaaggagaatcagaaagaggagataaaatgggggaatggggcagaacaaagaatttgtcctttcccgcttctgtctagggtctgctaatgctggcttgacgaggggtcagccacttctttcctgttgtgcagttggcttgccaagcaggctccagtaggcccttgcctgcactctctaccatgtgaccatgagcactgctctagggacacctcccatcccttcctagcaccccaaatgccccttcccatctctccttccagaagttggaaatcaagtcaactggataacgcttgtgtgagacacttgagcagaacggatacaacaatttacaagtctcttcatatctatgtattctatattaaaagtgataaagtcatgtttccggggcgtattcaagtagctgacaagtaattatttaataatagtacatgagcgcattgtaattatcctcgccatagtcaggtaatagcatccaatgggaggtccctaccaacctgctgtatccaaagttttgtaaaaagttgtagaagttgttgatctttttgattttatattcaaaaagtctctttttataaatattatttattatacaatgtatatacctttgagttaactaagattatatattatataaatatatatatatt

SEQ ID NO: 39 - DNA, 1068 bp, Mus musculus
atggagccccacctgctcgggctgctactcggcctcctgctcagtggcaccagggtcctcgctggctacccaatttggtggtccctggccctgggccagcagtacacatctctggcctcccagcctctgctctgcggctccatcccaggcctggtccccaagcaactgcgcttctgccgcaattacatcgagatcatgcccagcgtagcagaaggtgtgaagctgggcatccaggagtgccagcatcagttccggggccgccggtggaactgtaccaccatagatgacagcctggccatctttgggcctgtcttggacaaagccacccgtgaatcggccttcgtgcatgccatcgcctcggctggtgtcgccttcgcagtcacacgctcctgcgctgagggaacctccaccatctgcggctgtgactcacatcataaggggccacctggagaaggctggaagtggggcggctgcagcgaggacgccgacttcggggtgctggtgtcccgggaatttgcggatgcgcgggagaacaggccagatgcccgctcagctatgaacaagcacaacaatgaagcaggccgaacgaccatcctggaccacatgcacctaaagtgtaaatgccacgggttgtccggcagctgcgaggtgaagacctgctggtgggcccagcccgacttccgtgccattggcgacttcctcaaggacaagtacgacagtgcctccgagatggtggtggagaaacaccgtgagtcccgaggctgggtggagaccctgcgggctaagtacgcgctcttcaagccacccaccgagagggacctggtctactacgagaactcccccaacttttgtgagcccaacccagagacgggctcctttggtaccagggaccggacttgcaatgtcacctcccacggcatcgatggctgcgatctgctgtgctgtggccggggccacaacacgaggacggagaaacggaaggagaaatgccattgcgtcttccactggtgctgctatgtcagctgccaagagtgtattcgcatctacgatgtgcacacctgcaagtag

SEQ ID NO: 40 - DNA, 70419 bp, Homo sapiens
tgcctgccttggcctcccaaagtgctggaaatacaggcatgagccaccgtgcccgacctgggcagaactacattctggatgcatcttaaacctcacctcaaccctacaccctcccttttgttgtttcctttctccccacaagtcatctcagaatgaggctcccagctccaggctccagttgcaacctcacccccacctagacaaaccctcaaatcaagaaaaagaagccctggcagggcgtggtgactcatgcctgtaatcccagcactgtgggaggctgaggtggatggatcgcttgagctcaggagttcaagaccaccctggctgggcaacatgatggaaccccatctctaccaaaaattttaaaaaattagcttgttgtggtggtgtatgcctgtagtcccagctccttgggaagctgaggtgagaggatcattagatcctgggagatggaggtcgcactgagccaaaattgtgctgctgcactccagtctgagtgacagagtgagacgctgtctcaaaaaaagagaaaagaaaaagaaatccaaaggaaaaaaagagagagacagagagaaaggaaaagagaaaagaaaagaaatttctgttggccaggcccggtggctcatacctgtaattccagcactttgggataggccgaggtgggcggatcatgaggtcggcggatcatgaggtcagcggatcgagaccatcctggctaacatggtgaaaccccgtctctactaaaaataaaaaaaaatcagctgggcgtggtggtgggtgcctgtagtcccagctacttgggaggctgaggcaggggaatggtgtgaacctggggcgcggagcttgcagtgagccgagattgcaccactgcactccagcctgggagacagagcaagactctgcctcaaaaaaaaaaaaaagaaagaaatttctgtctcaaaaaaagagaaaagaaaagaaaaagaaatcctaacactcatccatccttaagtaaaagcaactcaccttgtaagtcagtctccacatttaatccaactaccctacactagacatgatgggtgaggaggatacagatagttaggaggcctttggctacaagtaacagcctcaagtgggctaacgaacaaggaaaatgtattatttcatatcacaagaagttccaaagcaggactcctctgaaggcagttagtgtctcagcaatggtgtcagagatgaagtttgtttctctctcttggctctgtcttcctctgccggtcagcttcatcttcaggcagctttcctcatagtcacagaatggctgctgcagctccaggtatcccaacccaaaacaacaatgtccaaaagcagggaaaagatatttcttactgtgtgtcattttaagagccccaaaaactcttcccagaaaccttcttgcacccttcagctgacctccctcaggcacatgtcacccagtttaggccaatccctggcaagcagaatgggtccccgtgattgacttagatcagtcaggatttacctctgagcaaggtaggggaggagtaaagaccagaacaaactgggggcctctgccatcctggaggaagggaccaccagcagtgtgagctacactaaatctaaacagaagcctgtcttccagaagttcaaaaacagcagctgaggctgggcatggtggctcatgcctgtaatcccaacactctgggaagctgaggtgggtggatcatttgaggtcaggagttcaagaccagcctggccaacatggtgaaattctatctctattaaaactacaaaaattatccaggcgtggtagcttgcatctgtagtcccagctaggaggactgaggcagcagaatcatttgaacccaggaggcagaggttgcaggttgcagtgagacaagatcactccagcctgggtgatagagcgagacttcatctcaaaaaaaaaaaaaaaaaaagagcagctgattgccacagagggagggagtggatgctcaccgatcattttacatgtcccaggtgccatttcaaacacagcagctatcactctgctgaataggcaattgtctttttgagacaagtgttattatacccattttgcagttgatgaagcaggtacagagaggttagataatatgctcagtgtcacatagtaagaggcagagctgggattcactggggttgtggtagacctgggctctaacgcaaccactcagagaggatttcccagtcagacatgtgaatccccattcaggccttatctagaagccaagacaaaggtgcataagaggtgggtcctgctgggatgtgggaaatgccaggcagatgtccctgcttagcccaagggccctcccacgtctgtgccagctgtgcctaggcccttgccagtgaggcagctgtgaccccattcccagcccactgggcctccatccatgtgattaggctcccaggactcagggcccatagctggccaccctgaggtcccagcaatgacagctactggccatactggtctgtggagaaggtggttagttggcagagttctggaaggtgcaaaccaggacttcactagaaatttcttcaccatctccaaggatattatcaggcttgttctattctatctccctaatgtgcccccacaaaagtcttccccgcaagacccctgagatggagagaacttccacacctctgttttgtttcgttttgttttgttttcttgagacagtttagctcttgttgccgaggctggagtgcagtggcacggtcttggctcaccgcaacctccgcctcctggattcaagtgattctcctgcctcagcctcccaagtagctgggattacaggcatgcgccaccatgcccagctaattttgtatttttagtagagacagggttttgccacattggccaggctggtttcaaacccctgacctcaggtgatccgcccacctcggcctcccaaagtgctgggattataggcatgagccaccatgcctggcctggttttgttttttaaggaaacatttacgtatttggtcctctgatgaatgactgtccccagcagatggcaagttccttgcaggccaaaacctgggctgcttttgctcatcagtgctcagctgccaaggggcagctgcacacagagttgctccatgaagatgcgttgaagaaatggaccaggtgaaattcacagagcacctactgtgtgcatcaaccggagctgggttataaggaagaaggcagactccttgagggtagtcccattcctcgtggagccttgtccacagcaggcatgcagtcaatgtgtgcgatgagaaatacagacactttccgccctcagagcccaggcggaaggtgggggcccatcgtgactaaggttggagacagaagagaccaaagatggctccaagcccctcctgggttgcaaccagggctccctccccttccctgcctgcttatgtcccatacacaggggagtggaaggaaaactcaggagctctagttccaggtgactgagagaaaccgtggcagccacacacagaggtctggctctaactcctcaggtaggatcacagccatgctaggagctggccttgggttagagccccaaaagccttgggcaggccagccatgtccagggatggggctcagggttatgaggcaatggcagaataaaggggcacagagggaggctgaagagaaagaaagggaaggagaaagaggtgtggcacatggctggagaggcagcacgaggggccaccaagccccagatgcccccatgtggcagtgacttcccaacaggctgcccacccttaatctcatcccactggaggcagcacagggtcctatgaaagggacacaggaaccaagcgacagagcagggtagctggggtgggttggagttgtaggggccagggccactcaagataggggcactgaggaccctgaggggccacagggagcccagacctgagtcagtggcccttctatctgagacctcggccctgcctgctccctctcctctgggcccatcatcaacagtgttttcgaggggctgctaagtgctggatccctcaccactgggggttcagcagtcttgtggagggagtttctttgtggagatttcacagttggagacggacaacatatgcaagaaactgagcagatatgtctgctatgtagtatgtataatcagccgggcatgggggcttacgcctgtaatcccagcactttgggaggccaaggcgggcgtaccacctgaggtcaggagttcaagaccagcctggccaacatggtgaaacactgtctctaccaaaaatacaaaaattagccaggcatggtggcgagcgcctgtaatctcagctacttgggaggctgagacaagagaatcacttgaacccaggaggtggatgctgcagtgagccaagatcacaccactgcatgccagcctgagcgacagagcaagacaccgtctcaaaaaaataataatatgtgtaatcacatattaatcacatcagtgtcagggctatgctggaaaataaagctgaataagaggcctgacaggacagggctagggagtggcaaggggtctggaggggcctctctgaagtggatattttgaagtgggtcttggaaggggacatcagacaacattatcccggataaatccttctggagaaggctcctgggcgcctgaagggggactgcttagcagacactgactggggcaggaagagagacctgagagagaggcttactccttgcctcaagagaagaaggaaacccaatattttgtattcaccatccgcagtctggcattccgtcagcaccattctcatttaacgctgacagctccctacaaggtggaaagtgttatctccactccacaaccgaagccagggactcagagatgacaggcaaccggccagtgcccccaccccaccccattccctcccttctaaaggactttcaccgcaaatcgctttccaaaatgctctggggaggccaggcatggtggcttgcacctgtaatcccagcactttgggagaccaagatgggtgggtcatttgaggtcaggagttcaagaccagcttggctaacatggcgaaaccctgtctctaccaaaaaaacacaaattagctgggtatggtggtgcatgcttgtaatcccagctacttgagcggcggaggcaggagaaccacttgaatatggggaggtggaggttgcagtgagccgagactgcaccactgtactccagcctgggcgacacagtgagactctgtcttaaaaatataggtcaggagttcgagaccagcctggccaacacggtgaaaccctgtctctactaaaaatacaaaaaattagtcaggcgtggtggcgggcacatgtaatcccagctgcttgggaggctgaggcaggagaatcgcttgaacctgggaggcagaggttgcagtgagtcgagaccgcgccattgcactacagcctgggcaacaagaatgaaattccacctttctatatatataatatataatatattatatataaatatatataatatattatatataaatatataatatataatatataaatatatataatataatatatataatatataatatataatatatgtgtttattatataatacatatttattataaatacatatttattataaatacatatttattataaatacatatttattataaatacatatatatataaatacataaaactgaatgccctggggagctagagctaagacaggaggaactactgccacagggagaacctctcaggtgcccacagcggcccctgtgatctcgggatccaggaagaactggtgacatccgcctgccgctggcagcctcccatatgtcagcggaagagggaggcatccgcagggtggatctggcggtgccccagtgcgccctggaccggcatcacctgggcccgctcgccctccgcctgtctggagaggagaggggagcctgaagccatgcaccccttatccccagctaagctccgggattgcgaggtagattaagggcattcactcaggagggcacctgcttaaccaagatcctccgaaatccgggctgctcaccagcaacaattgaggatgccgggcccgcagggagcggagtgggaccaggcgcgaccccttcctcgcctgctgacctcccgccttgctatcagcactgccgccagggggcgcgcccgcgccgctgggctctgagccgacctccgcgtgcacctgcgctcctttgtgtgttagattaacatctggtgcttacctactatgcgcttactcggtgcaggtcaggggcttcctgcatttccaggatgcagcctctatgccagcaaactaggctgggcagtggaaagaaatccgatttactcctgcgcccaccacccacgctagggccttcctgcttccaggctctgctgtccagccttccagtggcctctagggagctcgcctaaaaccgctctgcggttcctacagctcctaggagaaagttaaacgccctcctctccaggtcagaggccttggagccccctatgtgctccctttgcactgttcctccataagccctgtggtgttaggccttcggcccttcgcacttccccacctgcttccccgctgcaacggcttcgcctctccctttacccccccaggttggtccggctcccgactcccgcctggcagccccaagacctgtttcaagcaaaaatgaatggcacagtgcctggatcggagatttcctcctccttccccgcgacagacgggtagccccatgagggcgggcgggggcctggccaccggattctttgtctacacggtgcctccgcagggggtccagtggagcctcactgaatacacagcggcagactctgagccccgggggagtgcacatcaaaaggaacctccgagccagctagagagaggggttgggttgggactggggtccccttcccaggtctaaggtcccacacattcacacacacaacaaaaagtgcttcccacgtgccaccccatgtccccaggtccctggcccttgctgcctcttctgccctcttccaagagaccacccttcctttcagggcgatggcctcctggtccaccggctgatgcctccaccccgccctcccttcctggtcttggagtgaatttaaccctttctccaccaagtgaaaccaccctggggcttggggtacctgttagagagagggtgtttctatctgtgatgtgtggtcaggggcgcccgccctcccctgagagaaaccattcctgcgtttccacccgcggcagcgcaaggggtgcaggaggaaggaaattaaacctgtgttgaaggaaggacacctgggggaaaggaagggactcaggctccccttgtctgaggagctttcaagtggcggaaatccccacacacacctccattcactaggggcctggcagggccgctggtaggttccagtcctctcctctgtcacttcccaggcgcacatggccagctcctagattccacccttcaacccacttgtttcctgcctgatgcacatgacctgcgtctgagttctccaggctgcctggaggaggcattcaggtacacatgacccctcagggaatgatgttcttgcccacagcacccaggatgctggctgggcatatctcagccaacacacactcccaccgacagcctcggatcttttgctcccacctcacagggttggcacctgtggagtcttgaggcccagtaatgaccccaagaagccatcaagtccaggccctgtcgccccaccatactgcatccacagtggtgtctgagtggccagggaaggtagccctccccagctctcagcaccactgtcatggggctctggaactcccgagcccttgggcaggactccagcaggcagctctgatcagaaagccacctgggagccctgtgggtgggacaggactccaggtaggacctagcaggcctccatccaagagggaggtatgtggaaagctctccactgccagagccttggtcctgaggctctgcattcatggcaatggtaaccctctttccaggtgaatcagaaacagggcaccccagaatcagcccagccatgaggagcatctctagggatccccatctctgcagcccccaccaggttcaccactcctggtcaggttcacgatttttcttcgccttgcagctccttggtgctctccgcctcccccctgcccctttcttcctcacaccggtggctcagcctccccccgacagttttcttggtttctgtctcagcgtctctctcatctctgagcccctctctctctctcctcctctcggattctccttttcctccccttccttcctctctttcaacctcccctcccaccccctccagtccagcaatgggctgggaacgcagcaggagccatgacaagcccaggcggctctcccgacccttggtgcccccgaggccatttccccgcgctccctgtgccggcagcagccgcgtgcggagagggctcgccgaccagaaggggcagcaggttggagctgtgggtacggggggctcagatcaaaggccaggaatgtctggccccctggcgtaagacttccttcagccatggccctcacctcgtggaacgcccgccgttccaggcctctgtgggactcgggtcggctcattctctgccctttctgccacagttccctacacagcggtccctgctccccaccggcagtgcttccttcaccccagaccggggctgcgcagagtcctggtgcctcaggtggcctgggagggggcctagggaaaggcacccaggtgaccgggcgtgagtccccaaaacctgaccatgatgtcaataccacccagggctgagacctaattcctcgctctggagagggagaggagaggaagcaagcccgaagggggcctggaaggactcctttcctgtggggaggggtgggtaactggaggcatttggtgtccgcacagggcaagggcctttatcgccaaaccccaggctggagctccctatcagtagaaccggggcctcaggcgggacggtcgggcagtgaggggcgctccggagggcagcaaggtcttccaaggacctgggccgccctcggccagagctgcgcgtttcaccggtccctgatggtccaaccgagaatcccactgaggctgtgggtcacgcctccgacccgggccagaggtcgggcctgaacccctcaaggaggagaaagtgacccgactccgagagcaggaaatgcgactggccgctggtgtcagttgcaggaaatgcaaaggcagcaggaggtcccgataccgatctgatccctgacaaaagactcaaatgacactcggctccgtcccccggcgccgcccgcagccagaccttcgagcctccgcggacttttccgcacgttcctcggacacccgggaagtgacctcccgcggccaggacgagaggccagagagcgggcggactcgggaggctggaagctgggagggggtgcgttcccccaccctctgatcctgacctgcccgagcggggcttctggaaacatccctgtgctttctaccctcgattcctcgcgggcccacgtcccaacgggtcacggtccccgccagcaaaggagccacccgttcatgcccacgccaagccctcgccatgtgaacgcccgggtcaaagcccccgcgccctaaccctggccagcgggggaccgcggcggtagcagagggtccggcccaccgcgtccccccgaagccccgcggcgtccggggcgcgggctttgcccaagtttgctgggcgatgcccttcccggagcccgagttgtgggccgggcgggaggggcgcgtgattgacaggctgaactacagactcatctcttaccttaggccgcgggcgctgattggctgctcgctgacatcctcaaacccggctgctccgcgctgggctcgggaggggggcggctgcgggtggaggtgcgcttctgacaagcccgaaagtcatttccaatctcaagtggactttgttccaactattgggggcgtcgctccccctcttcatggtcgcgggcaaacttcctcctcggcgcctcttctaatggagccccacctgctcgggctgctcctcggcctcctgctcggtggcaccagggtcctcgctggctacccaatttggtggtaagactcgcctcttgtctgcccgcggcccggtttctccgccgcgtccggggaaggtgggggcgccggctgggggtgggccgctgcagggctggggctcctctcctcgcctccctccagccccccacccgcccacccctcctggattttctgctggtgtcgccttcagaatccaactcctggctcctctgataatcaccattttccctgctccccgctgcaggggctggaggacttttcccatctcagaaggtttcttattcttagatcctaaccctctgcccgtcccaatctagaggcccccgaagaccccccatttgcttgcagttgggtttctggaaatccagcactgtccctggggcccagccactcctcttctccattttggggtcttcatgggcaaaaccatcctgttccttcactgccaccccacctctgccggcgcctccatcaagagattccccataataacccccctttgccttcctatttcagaccccaaaggcttcagggctcctcccggggcaggggagtgggtggggggatttcatcagattctccccaccgctctagattcatcttgagcctctgaagtgaatatggtatttgctgatccgggatgccattgaattcggattttattcatttcttgcttgtccaccctggcaaaaggggggttccttgaaaatgtgttgtctgggaggggtaggcttgttgttctttgaccaaaaatccaattctccatgtcacatttcttccttttggaaaaccgaggaccgaggagaaagggagagggaagggagaattccgtccctgagaaatgtggatacaaaagacattttagtaaataagactgggaagccgggagcagtgcttggggggggctgtgcgtgtctggggggcctgggtgaggaataaacatcgctttgggagccccagctccaggagtccccttgttttccgagcggccccatcgccgctctcccaccctccgcaggtcccaggggccagaggggaagacactgaaaccagttctctaaattacactccgcctctccccagtctccagccccctacattccggaaaactttaattaaagaatcttcccctcctggacataggagagccttggcctgggcggggggaggtgaggaggaagaatttgggatctgtgagtgagaagtgggctgtggcccccggggtgaaagtcagaaagaagtgccaccacggtgcggtaccgcctgcaggtccccagactccctgcctttcgccaacccagagtccagggtaggaggagcagagacagcgagacttgggggccacaccccgagtcttccagttgtttggggatggcagcatttgtgtctgggtgtttggggctcctgggagagagggtggggacatggccaagggtctctgtttagagggtgctaggagttgctcccaggacagccagccaaggggaagtctttcttctgcccaacccacacttttccggggggctgggctaacctgaggcttccagcacataaagaagtccatggggtggccagggcagccagggacttcaggaaggaggttcggccagtctggggaaaggctgctgccaacaccagtccagcctcacccggccattcctgaccctcttcccattcccgggccaaggccatgccgtttttcgccttgctttcgcagagactctggtgggttgggggagggtaggaaggaaaggtttggcggcccataggtggcagggactgaggaagagagaccagtctctccggccctatgaactagaagagggcactcttccagttggtgtagattctggtgtgaaatggtatcttggggaccatctagatagggattgcccaataggaagaaacgctggggaaacctggaaggtcaagacattggccctaacataatgctagacacatggcttgtttgggaatttggtgggggacaggaatgctgctttgtctaagccaaggagagaggtgtgtgtgtgtgtgtgtgtgtgtgtgtgtgtgtgtgtgtgtgtgcgtgtgttctgggtctatgaccctaagaggtgttttctatacaccagtgtgtctctgtgtgcaaaagtgtttgtgcctgcaactgggctactatggatgtgaaatcgtgtgggcgtgttgggggatccatgcccacgacaggttgtgctgtgtgtgtctgcacacgagtgtgagcaagtggctggtgctgtgatgtgtgtatgtacatgtgtaagagacagagagaagtctagaagtatctttgcccatgtaaaggtcagagcctgtgtctgcctgtgacgctgggcttgactgtgttcatgactgggcatgtgagtgtgtgtgtgcgtgcgtgcgtgtgtgtgagtgtgtgtgtgcgtgcgtgtgtgtgtgtgtgtgtgtacgtgcgcgcgcatgccttcatgacagtgtggggaaagccccacagatgtctttgtgcatgaatatcagtgctcatggccatgacctgattgtgcttgtaaggaggagagtgagcctcaagtccatagctgtgtgagggctgtgtctgagtccgcctgtgatcctgtccccaggtgctgggcccagggctgtgtggctgtgaatatctttgcagacatctacctgtgggtatgaatgacacctgagcttgggtgtttggtgggcagccatgggcctggagggaaggtccaacaggaagcaaaagtctcacaaggtggctgcagggggcacagctggccagggatggcaagctagagaggcaggggcacaggcttccttgacaccagcttgtcctgtctgtccaggcactagagtcactggcccttctctctgaggttgtttttctttggtcttggagctggggtggagggtgagtcaccttctcagggttagggctggggctgtagggtagatgggcctctgattcctgatcccatttctgcccccactccccaacccagccccccgcctggcagtcagattccagtactttgagcatctaagcccatcttggcctgccctctttggcccacccagctcatgcattccccaggaaggatttacaggggaagtcatgtagctgggatttctgtccacgcggaccctcaagcatgacaccctgagtccacactgctcagaccccagtcctgacagaaggttgaccagaagggacagctctaaggggcctcagactgacacccctggaaggaagagatgttctccaggtagtgacagagccgggacaggaaacaacagcactgatttctcgaattccccttgtcagtcccagttagctcctggtggagaaacttgtctttcttcttcttcttgggggcgctggggtggggggatgaacctatgttattagggcctagcccagcacctgctacattccagcgatggacgtgcagatggagggggcctgctggagatcaggagctcaccctgccgctgtgtgactgaggaccagtggccacccatctgggtctgcttccttacacttcacccaggagtccccagcctgccctgcctcacagcttgggtgaaaatgttttgcagaggacaagggcagtgagctgggaaatagcacacctgagttctcgccatcccaggacccatcctcccactcgagcacctgcctaagacctacctcagtttccccatctgtcagatgtcctgctgcctctcccacccactcccacctccacccacctttcagaggcttgtgaacatgttcagtcaaaccccgtgggggtcagtgggctgggcccagggaggcacctggagactgcgggggaggaaggccccaggccaggtgttaacacttgtaacaggcaggaattacagctcgctggggctgggctggctggggctggtgaggagctgagctagctggaggctgttgatcccacagacagacagacagacagacagatgggcagataccagatcggatggccaggctttaaccgggtggtctcccttccagggcagacctttccctgggggggatatggcggggaaattagtccaggtctcttggaagttaacagccctcccgctcaccccgcccccattatgggtggggcttcggagtccagagggagcaaaattggtggccgatctgttggtattcttccgataggatcacattttgcttaaaaagaagaaaacaggtcaaacgttataataataccaagagcctgagctgagttatgtccttagaagaacctgctgtaatatgtatgtggatggcatgggggaaggggacgctctcagggaaagttctagactctcagagcattttgtcaacagctccggggccaagaggtgagagatgggtggagtctgagtatcacccccacctccaccccagggatcctgagggcttgggtctgtgatgtctgccctgcaattaatcctggcctggtgggaagacctttggcgatgaggtcaaaagaggcaggagctggactttggtgccaagtcctttaggaggtgcttgctgcagcttcaccagtggcaaacccagccaggccctaccagggcccacactctggcatctggatacatgctcagtcactgacaaaggtggagaaactgaggcagacagcgagggctctgggtggaaatctccaaagaatgcactcagcctagcaagcatctctcatcctcctcactacagaacttaatgctaataaacattaatggtacttgggcagatgtagaattggaagaagtctctccttggtctgggcaggagacaaggagccaggggataaggagccaggggatggcacaggaaaggtgacttatcacagaggaggatgcagctaacaaacccttccagggaaaaggaagtgggaaaaaggaagatttttctggtctcagaatgtgatgagccaggagttgagcagaaccttttccacctaccctgatgtgagccacagaaaccttctccagctgccaaggagggcaagacatcctccacccctcattcctaactcagggaggaggtatgcctagccccacccccaccccccgccaaaggttagagccatcctgatattacatctgtacatccatgttatcttgtatgctggaaaatggtgagagtggggagatggagagacctatgtctgaattccaagtttaataccaatggaccctgtgacctaggatgagtcccttcccttctctgggcttcattcaagtccctgcctccttctgggcttcattttccttaaccacatggaggggtcccttttgcctctcagagtcccagggctatgacaggttctgggctcgttgctgtgaagcatgacactctactgcacacattccgggcctgtattagacagtccacccgtttctttctgtggctccatctgacctaaatcgcaaagagctggctgccccactcctgccaagccaacctgcttgcacttccaaacctcgccccaaacactcccactcttctggagccaggccatctgcattcacatctggctttttcatgtactacctgggtaactagggcaagttaacctctgcaagcctcagtttcctcatctgtaaaatgagtgtaatgattgcctctatttcatagggttttgaaaatgattgagtgaatacttcttagaatgataccttgcatacaggaagcatatcgatgttagctattttcacctcctatctgcaagctattggctcactgaagccctggagccaaacttgcctcttccaagaagccctcccagatttgccccacctggctctgttttccccttttcttctttttgcctgtttgccccacagtgctttagctttattcttaagttgagggtgctgggccaggctaatctcacttcagctctttacctgctcaggaaggggagggcagggtagagaaggttgctggagtgtcccctaatcattccccgacccccagagtctgccagactcttgctgggacctagagccagggggctgggcacagaaggggtgggggaggcaggcttcccagggggagtggcaccagggccgcccagagcagcctgagcagaagttgcttctctaggagctgagagatgattcagaaggtgatttatagtcggaaggcagaaagcttggctcctggcagaagctgctgcttaattacattcttggggcgggggtaggggggtggaggtatgtgtggggaggcagcaggggccagacttctgcctcctccccatccaggccctccctgtccctttggctgtcccggctctaagcagggtccttctttatcccgctgccagagagggaattccctgctctcagtgagaggctaggccaggattgcaggaatagcttctgggagtggagaaggtgggaaaagaggaaggaagctggatcccatctcccgggacttctccaagggagactggatggcgacgggctggaaaacgggccttctgggaaggagcactgggtctcctccctgcttctgggcagcggaatagctaaggcacctgggcagagttgagtttctttctttctttctttttttcttgaaacagagccttgctctgtcgcccaggctggagtgcagtggcacaatcttggctcactgcaacttctgcctcccgagttcaagcaattctcctgcctcagcctcccgagtagctgggattacaggtgcgcaccaggatgcctggctaatatttgaattttttagtagagatgggggtttcaccatgttggccaggctggtctcgaactcccgacctcaggtaatccacccgcctcggcctcccaaagtgctgggattataggcgtgagccaccgcacccagccagagtttctagaatcttctgagaggcaactccacgctctccttcgggcaccctgtcctgctgctgcctgggagggcctgcctgcaggtttgctccttttctgttgctcaggtctcagtgggccatgggggctggagagaaggtcctgcgctcagaggctgaaacccggttcttcagcgttaggcagcctgtccctcgtgagcacagtggctaccccaggtgcacaacggttctgccagcaggcacggccccataccctcatgtcaaactaatatctcagagagtcaccccaatgccgctgggtgcagctacaatcacttccgcgccattgacaggagcccccattctgtttccatacctgctgagttgacatcagcatttcccatattaacactgacccatgcaacaacccgcccgatgacacctaaggccgcttagttccctgcatcgcagccgtgaatcccaaatccctcactgctagttcttaaggctggaaaggtgtagggcgggcaggggtagagttgctgaagccagtagtgtcgatttatctgtttgcagcctggcctgtacagccgggaggagttggcaggggtcaggatggggacactagacagctctctggttccccctgaggcgggccttctcaaaatggcctcattatgtgtgtggagtgaattccagaaatgtcaggcacacccatacatctagggaatgaaggagatgccagagcgggctctggggcgagaggggccagtgtgaggaggtgggcggcttccgggcagggagttagggcacctgagacctggctctgccaccatcttgatattaggcaacttcctgaactgttctgagtctcagtaactaggagagttggataagctgctggccaaagacttccagctccgagattgcagtcatggaggctgtattccgcgttcaggtcacccagctatttggaccatctgtgcctggtggagggggtggtcactgaaagctggtctcagggaagggtggggggtgcagagctctaaactctacacacaaagagctgtgagacagtggatgagtctcctccctccctcagttttctcatctgcaaattggatgatgataataacacgaccacctgccctgcctgcttgcagggccgtgaagagcttcaggtggaataatctttgtgggcatgccccgtgaccagttggcctcagacctgaggcctctgtgccctctgccaggggctctccattgagcatcaggacccctacaggaaggagctgaggactccttcctgaggacacttgggaagtgtcaggttctttccagagaagttaactatcactgtgagtcctagaaaagaggaataagaaggctgggcatggggcttacgcctgtaatcccagcactttgggaggccgaggcgggtggatcacctgaggtcaggagtttgaggcctgcttggccaacatggtgaaaccctgtctctactaaaaatacaaaaaattagctgggcgtggtggtgggagcctgtaatcccagctactcggaaggctgaggcaggagaatcgcttgaacctgggaggcggaggttgcagtgagccgagattgcaccactgccttccagcctgggcaacaagaccaacactctgtctcaaaaaaaaaaaaaaaaaaaagaaagaaagaaaagaggagaggaataagagctagtccctgctcagacagtgctaagaatggacctaagagcccccctgagcctctgagcttgaggagttgatatttccagcagaggaagaagtggggctggacaggggagtcctcagctccttcctgtaggggtcctgatgctcactggagagcccctgggagagggcacagaggcctcaggtctgaagccaactggtcacggggcatacccaggttcacagctcagggcatggggcttggttatcctcctggcctaatgcaaaaaccactggccagacccagagtgagatttccaaccagggacacatgggaagatgtaggtggaggtgaggggggcgagggcaaagggctgccagctggaaggggctctgctgaggcctgtagtcatcagggaatcctaatggcctgggtaaggcctagcaaactaggagacaggcacaagccattccctccagctcggctggaaaaactgcgaggactgagtgtgtgtacgtgtgtgttggggagggggatgggagcaacaggaccaagcacccaggtctgtctggaagacctttctgggaaacctgcccctgggcacagagtcccacttatctgccagagccagctgggccggcaaggaaaaccaatctcgcagggcccattaggaatgcaaatagggcttgtgctgtgagtgagcaggatcccgcctcctctccagctcccaccaatcatcttcacaaggtggattgctgagggtgccactcccctgctctgacacctcccatggctcccctcttcctatctggtactgaggctccctatgatttcacttctgtccacctgcgcagttgtaactttcacaaaccccctcgatccccccaataacccacttcaactggaatactcacctctttgcttgttcattgaaatacttccacctcctctctctgactttaaaaggcagcccaacctggggcctgttgacctggggtcagtctgctctgcgctgctcagctcggaccccacttggctcaggtcatgtagctaacagccctgaactatggagggtccttagagggtctctcaaggtggatgggcccctcgacctgagcaggctgctgtcccaggagtggagatgagccttttctccacagtgtcaattcccctgggtttctttttctttttttttaatcccagttccacttgtaaacgtttcctatttgtgtactatttccccctccatgttcaccagttcacacgatgcttaagtgtctaagtcattaattttaagattgcaattggcagaagttgtttctctatctaggaacaggttaatacgtttgttgaccatgtgctatgtgctgatccccatgcagacatcatgatttatctgaatctaattcttgccagtttatagatagggagtcccacagtgcagcctgggcatggcatgggaagccctgagcccacaccctgttggacctaaagcctttttccttctaccaccattcaggctcagttgtggacttgttattggggtaaaaatttgcttgttcatattctactttgttccccaaaggatggttttgagacaagtttacacttgaccttccactcaaaggctgatgctttgggcttatagatactatttgtgaacgtctgggaagtctcttatttggggatgtgtcctcttcactggccacctttccacaagccatcaggctgtcctcaagctgggattgcacagttgctgacagcagtggccatgtgaggattttgttgcccctgggatgggtaaggggcgaccttgatcaaatcactgcctcccgggcctcagtttcctcatctgtgaaacagaaagggtagcgtaaatgacctctcagattccttccagcactaagctctttccttctacttagtcctttttgctgctttgcatctggtctccatcatatacgtgctagaaagcagctgggcagaatcttctttcttgccctagtccaattcttgtgttggtatctctgaaacagccaattgttcatttcacttttacaattcgaccttcagctttatttctccccgaggagccagcatgctttctcctttctgataaagcatgcttccctttatgtcctggctatgagaaaactcagaggtccacctgaagccacatccttgcacccgtgtggaccttccctgatcctgctcttccgtttttattttgttattgaatctgatgtgttttccgtcatcagcctcttgagggcagacatgttggagtctttgtacctggcctgggcataatggatcctcaataaagacttgtctttgggatacacatttgctgtcaacctcttcaaatcctttctggaaagaagcaaggcacatgcgaattaaaaagcaaaataaacattgctctgggagggagttggtcctgactggatagttttgagttatgagaattccagtctgcttctgtttcttttttttctgtttatttatttacttagagatggagttttgctcttgttgcccaggctggagtgcagtagcatgatctcggctcactgcaacctccgcctcccgggttcaagcaattctcctgcctcagcctcccaagtacctgggattataggcatgcgccaccacacccagctaattttgtattttcagtagagataggatttcaccatgttggtcaggctggtatcaaactcctgacatcaagtgatccacctgcctcggcctcccaaagtgctgagatgacaggcgtaagccaccaggcccggccttctttctgtttctttactgtcagcttttccccaagtctacaaaggtcttgtcttcagagaagtcgcctcttttttttcctccatgatcttctccactctaaagctgaggttggttcctaatcttcctctagggactgtctctcgttcctggccaatgactatgtccacccctacccctggctcccttcacaactggttcctcccaccctcccttgccttggaagccgacggtgctattgccaccattccacaggtgacggagtgcccaggtagcacccaccctctctccaacagagctgctcccgtccccagcagccatcgtgagggccaagccccactctgcagatggagccccaaggaggagcagaggggagcggcggccagggatctccccattcacccagcaaggtgtcctcacaactctaaccggctctcccctcccctccgcttctgcccttgggcaacacatgtgcaggtcaccccacccagtccctgacttcggaggagagaatgtctagcctcaggctgggtggttctccatcttaactgaagcttccataggggattctggagcctttctctgctaccagtaaggatggagtctgtgacctctgcactgtcctggaagctaaagcagcctcgagaaagcagcctcttcatccccatgttacctgtgagaaaactgaggctcagctgggcgcggtggctcacgcctgtaaccccggcactttgggggacaaaggcaggcagatcacctgaggttgggagtttgaggccagcctgaccaacatggataaaccccaactctactaaaaatacaaaattagccgggcgtggtggcacgtgcctgtaatcccagctactggggaggctgagaaaggagaatcgcttcaaccgagggctgaagttgcggtgagctgagacctggccattgcactccagcctgggcaataaaagcgaaactctgtctcaaaaaaaaaaaaaaaaaaaaggaaaagaaaaagaaaaaagaaaaaaagaaaaccgaggatcacaggacccaaccaggagctgtaaggagctcggaagcaagtgggcggctccagtggcagctagtaattcctcgcttatgatgtcccgggtatcacatacattgaggaaacaaagcacacacattagctcatcctcccgacaaccccaggaggcagagactcttgttatccccattctacagatgagaaactgaggccctgaggcaccattccattgccgaaggctccatggttggtaaaccccagagctctaaacaagagacaaactgcctgaagccaggcccttcagtgacaccacaccacaccacagccaggaagttcctccttagatctgacttcagtctttccttaatccaggcccaggttttcttcctggggatgtgaatatcactgtcaagtttcagtttggtttggtttgagacaggatcttgctctgttgcccaggctggagtgcagtggtacaatcacagcccactgtagcctcaatctcctggggtgaagctatcctcctgccttagattgccaaatcactaagactacaggcaagcaccatatgtggctaatttttttaatttttatttttatttatttttgagacagagttttcactcttgtcacccaggctgcagtgcaattgcaagatcttggctcactgcaacctccacctccccggttcaagcgattctcctgcctcagcctctcacgtagctgggattataggcgcccgccaccacacctggctaatttttgtatttttagtagagatgggatttcaccatgttggccaggctggtctcaaactcctgacctcaggtgacccgcccacctcaacctcccaaaatgctgggattacaggcgtgagccactgtgcccagccttttttctttttttttgtagagatagcatctccctacattactcttgcttgaactggactcaaacaatcctcctgcctcagcctctcaaagtgctgggattccaggggtagggttccagtttgcacttgaggaccagggttcgtctcatccctgaatcttcctgtgtctggagttggttccttccagtgggttcgtggtctcactgacttcaagaatgaagccacgtacctttgcggtgagtgttacaggtcttaaggaccccaagagtgagcaacagcaagagttatcctgaagagcaaaagaacaaagtttccacagcatggaaggcgacccaagggggttggtgctgctggcttgggggtgggggggtgggcggggaggcagcttttattccctcatttgtcccagcccatgtcctgctgattggtccattttacagagtgctgattggtccattttacaaacctctagctagctacagagcactgattggtgcattcttacagagcactgattggtgcattttacaaacctcttgtaagacagaaaagttctccaagtccccagttgacccaggaagtccggctggcctcatctctcattccttctctagaacaattcctcccaggtgacccatcctctactcacctttaactacttgttcttcctcttctgatctcttaccagcttttctacaacttcctgcaagtcctatagccacagaattgcctttaaatcagggaaagagggggcctgccatcagctctctgatttagaggcttccgtctggtgtcttacagcacttcccttccccatagggcagggagtctggaatccagcatgcctgccctcaagaggcttatgacggaaaacacatcagattaaataacaaaataaaaacaggctagttgtggtggcttgcgcctgtagtcccagcactttgggaggccgaggcaggcagatcacttgaggtcaggagttcgaaccagcctggccaacatgctgaaaccccgtctctactaaaaatacaaaaattagccgggtgtggtggcacgcacctgtagtcccagctgctggggaggctgaggcaggagaatcgcttgaacccaggaggtggtggttgcagtgagccaagatcacaccactgcactccagcctgggcaacagagtgagactctgtctcaaaaaataaaaataaataacaaaaacagaagagcaggatcaaggtcaaggagaagacaaatatgcaagtcaaggtcaatgcaggtgcaaggatggagcttgccctgagtttcctcacagccaggacataagggaaaacacgctttacctgaaaggagaaggcatgctgggtcctcagggagaaatgcccgcctacagcctgtgcccaccctcttcagctgcgccatgagaatttaggctcctggagtatctggcccagacagccgtgagcctgcttccgggctctgcaggcctctgcctggggcccattctgccagggcaggccacactgcctgtggccaagggctggtcaagggaaattcatttgcaagggctgtggctggagcttgagggtgtggctggggcctccagcatgggatgcagaagggatgggcaggctgcaggcctggggctagatctcccatgtcaccattgtctagcgtgaactttatcaggtaacctagccctctaggtggcaagtaaggtttttgccaagataggaggatagaatgattgtttaacttttttttttctttcttgagacatagtcttgcactgttgcccaggttggattgcagtgacacgatctcactataacctctgcctcccaggttcaagcgattctcctccctgagccttgcgagtagctgggatcataggtgtgcaccgccacacctggctaagttttgtatttttagtagagacaaggttttgccatgttggcaaggctggtctcaaactcctgagctcaggtgatctgcctgtctgggcctccgaaagtgctgggattacaggtgtgagccgctacgcctggccaagtgattaactttttaatgaaagtacaggaaaagacgtaaactgtctttcctctgctttcaccctgcaataattggtacagaagacttctgtgaccaaatgcgtgcatacaccaagcaagctgtcaattctgcggcagacatcagccagcgtcctctaatccaattcaattctgatgatctccacctggacatagcatctgatcccataggttgaggtcttagttcccaggacagcctcccacttccagtagcaatcccaagccccaggctgctttacatgtgctcctgactgacctgctataaatcagggttcctgtgacttcctccttgggttccattaatttgctagagtggctcgcagaacacaggaacacacgtttactggtttattataaaggatattacaaggatacagatgaagaggtgcatagggcgaggtatgggagaagctgcactgagcttccacgcccttcccaggcacaccaccttccaggaacctccacgtgttccgctatccggaagcacttgaaccctgtccttttgggcttgtatgggggcttcattccataggtatcattgattaaaccattggccactagtgatcaacttaatcttcagccccctctccccttcccaaaggatggggttggggttagggttgggagtccaaccctctaatcttggccgggcacggtggctcacacctgtaatcccagcactttgggaggccgaggcaggtggatcatctgaggtcaggagttcgagaccagcctgaccaacatggtgaaaccccatctctactaaaaatacaaaaaaattagccgagcatggtggcaggtgcctgtaatcccagttactggggaggctgaggcaggagaatcgcttgaacccaggaggcggaggttgcagtgagctgagatcacaacactgcactccagccagggagacagagtcaaactccgtcaaaataaataaataaaagaaaagaaagtccaaccctttaatcctgcctgggtcttttggggtaaccaacctcaatcttgaagctgcctaggggctgccagctcttccgtcagctcattagcatacaaaaagacatcactttggagtttctaaggattttaggagttgtacgctgggaaactaggtcgaagaccaaatatatattttataatatcacaaacatgcgtacaggcgagcacacaacttgtcagtgtacagcttaatgagctggatagaatatcttatgtttaacagtttgtgaacctggcatgaaacttttcaatactgggcacatggtagatgaggcttcgttgagtggtctcaatgctacagccaggccttagggcttggcggggaaacagttccactagggtcgaactggcacagcatcgggaagaaggcttgcctcctctaatgtggctgcatcatctccatccctcccttggcagacccacagtggcactgccctccctcacagctgtggtcacttacctccaagtccctttttgttaaacttggaccatgttttagcctttctcagcctcaacggatcttcttttctgatcagtttagtcagtcttattttaatttaatttaatttaattcaattcaattcaatttgtttttcaagatagagtctcgctctgttgcccagagtggagtgtaatggcgcaatcacagctcactgcagcctccgcctcccaggttcaagctattctcctgccccagcctcccaagttgctgggattacaggcgcctgccaccatgctcggctaatttttctatttttagtagagatggggtttcaccatgttggccaggctggtctccagctcctgacctcaggtgatgtgcccacctcagcctcccaaagtgctgggattacaggcgtgagccaccgtgcccggccactttggtcatttttaaacggtctaattaggagtgcagcagcagcagatatgactgtgttgttgtatactcctcagcctggcccctgccgccctgcacccgctcctctcccaaccccaacatgggtaagcacatgggcctgggtacagcagtcctggactctagatggttctgcctttttatctgggtggacttcacctctccaagccttggttttctctctgcaaaatggggataacgagggctattgtgaggatgaaaggatataacgcatgtgagactagcacagggtcaggtgtgtactcagtgagttagacacacattttgctgacattaatttcatgttacagtctgcgttgttctcgtgcacacctcacttctccgtgcctctgtgctaccccctgccttctcttgggatgactacaaactcctgttcggtcttgaaatcatagttcagccatcacttcctctgcgcagccttccctcagcaccgcggccccagcaaaggcccttctgagcacatctatttcatggactagactgtaagtcacctgtgggcaggaccagttctccatcatctttcaacccataccaccaaacatagcacagggcacacagtggatcctcaaagacaggttgtgggatgaaaggacactgttgagagtcacctgctggtcccagactcttgtctccctgctccagctggattctcattgcctctgtgatgctctgccaggaagaccagctggtacttgttgtgtattttcctgtattctcagatacctcttcatgtgcatctgtcttgtcttcccagtgtaagagtcagcccctgagggcagggattctgctctgtaggcctctgcatcactagcgagcctcacacatcatcctgagtgttgcaggagcacagttaggaattctgttatcaggccaggcatggtggctcacatctgtaatcccagcactttgggaggccgaggtgggcggatcacctgaggtcaggagttctagaccagcctgaccaacacggtgaaaccccgtctctactaaaaatacaaaaattagctgggtgtggtggtgggcagctgtaatgccagctactcgggaggctaaggcaggagaatcacttgaacctgggaggtggaggctgcagtgagccgagatcgcgccactgcactccagcctgggtgacacagtgagactccatctccaataaataaataaataaataggaattctgttagcacttggcccaggaatcagactccttcccaagcaggctgcagttcaggctcagctggtccccactctctgggacagcactcccctcactctgtgatctcccaggaagtccggctctgggcatctaaccttggtgtggggaggcaacatagcactccagaaagagggtaggctctgtgacagaaccacctgtggtgcaaatcccagatgtccacttcatagcttctagaactttgctttgggtggttgcttaaaaatctgagtctcagtctcttcctctgtataatgggaataaaaaatatgatctcaaggtagttgtgaggttgaaatgaaataacagacagaaactggctaggcgcagtggctcatgcctgtaatccctacattttgggaggccaaggcggacagatcatttgaggtcaggagttcgagaccagcctggccaacatggtgaaactctgtctctactaaaaatacaaaaagtagccaggcatggtggcgcacacctgtaatcccagctactcaggaggctgagatgggagaatcgcttgaacctgggaggcggaggttgcagttagctgagatgacaccactgcactccagcctgggcaacagagtgagactccatctcgaaaaaaaaaaaaaaaaagtagaaataatagaaactgagttgaaggtgaatcattaaagatgttctacaggtcatctaatgtagcagggttataaaaatattctctcccaggccaggcttctttagagcagaaagatctgaattccttccaaaacagaaaaggctggcttcagggaatcccacacactttatgttggtttgtcccaaccaataagcctatctgaagaaagaagcgggtggggaggcatgtggcagaagtctgtgacttggtggacaaaaggcaatgcagactctggcatgaccttgcgttctggtatcctgttcagccagagtactcacaaaggcctccagttctcaggaagggaagggtgaattaaatgtggttagctatcagggatttttttttttttttttttttgagacggagtcttgctctgtcaccaggctggagtacagtggtgtgatcttggctcactgtaacctccgcctcacaggctcaagtgattctcctgcctcagcctcctaagtagctgggactacaggcacgcaccaccatgcctggccaatttttgtatttttagtagagatggggtttccccatgttagccaggatggtctcgatctcctgacctcgtgatccacccgccttggcctcccaaagtgctgggattacaggtgtgagccactgcgcccagcctatcagggatttttatgggggttccaaggagtggtctgtgtagatttaatatcaccctagttaatggctgaggcactggctgtgtaagcccttgctaagcacagtgagtgagtgtggctggaagtgcaggaggcctgggtgggatgcaggctgatccagggctggcagtcactgtgtgcatccaacctttaggcgagagagggctgctaaactctgagaaggaattcagggtgaagaagagctgatgtgccaatggtatggctggcacaagcctaagcagataccagctattctcctgcaagctgatcaaaaatatttttattacataatacttgacatatacaagagaacaatcatatatattagacatgatgacagaatgaaaacctgagcctcactatgtccctgaaggaccagaccgtgactaggccgtcgtgtccatctgtgggtcctcctcagcccattccccatctccctctagatgtgaccacatcctgaattttacctatttattccattacttaaaaatactggtttttggctgggcacagtggctcatgcctgtgatcccagcacttcgggaggccgaggcgggaggatcacctgaggtcaggggttcgagaccagcctggccaacatggtgaagccccatctctactaaaaatacaaaaattagctgggtgtgttagcacacgcctgtggtcctagctactcgggaggctgaggcaggagaatcgcttgaatccaggaggcagacgttgcagagagccgggatcacgccactgcactccagcctggagaccctgtctcaaaaaaacaaaaaaccaacaaacaaaaaactggttttcccaggtaataatgcctaaatgaaatgttttattttgcctatttttagcattataaaaatggtgttatactgcatgtggccctctatgttgagctattctctctctgcattgtgtttctaagtttcaaactgttcctggatcttgctgtagttctcacatgctcacagttgcataatagtccatctttagaatatacagtttatctattttgtctcctggccatggatgtgcatctcgctgtgcacagcagggaaaggtgttcatggaggtacctgcctaggcgtggaactttgggttgcaggatgtgtgaatgttgagctttacaagatgatgccaaactgttttccaaagaggttgtgcccatctgtgctgtcatctttgagattgtttttcccatggcccaaggcccttcttcccgcccgaggcaagcccactcctgaggactccactgccttgggccttcaccgtctttctctcaggatcccattccctactggaaaactctttcctttccctcctccacttggccctgaacttcccaggatttttcaaaacccagcctggagctgccgtcttcctgggagtcctctcagcctcacttccactctctcccaggtttttggaacagcttttccagacagctcttgggccagagtaggacatcgcatagtgtgtttcttataacatcagccccacataatcctgttgagaaaggcttctggagtcaaataaacttaagaatcgccacaggcaacttggagcctcttggtgtttattgttctcatttgaatattagcagctcattagcatagttgcagcactgagaggtcctgccagtgtgacccgtttttatttgtttaacttgttttccaaaaatatttaaccttggagcccttttcccattttcccccatttggaaaatgggatcgagaagattctcctgcctatttcagtcagtttggttttgtggtcttattttcctcggtaaccaagctgagagtcctctgacttctgttgtaatcatcccgtgtaaactagttcagtccagaccaccctttctggagggcttgagtggaaggaatgaatgaatgcactcaggaattaatgaatgaagcagtcagccaatcagtcagccatccagctgagccccctctcctatgcagcagccaggaaccagggactgatcaggcaccgctcatcttgcaccaggggacacccgggctgtctggctggtgaatcattctcccgtcttaggtcccctgtagttgcatttttaggatctgtcacccaatgaggctgggagcccctgcggggcaggaaccaagttgcgcttgcctctctgtgtgccccgagtgggacatacagatgggatctctcatccaactccttctgagaggggcaggagaacattgtggttaagtcttcagcctctggagccagaccagatgtgtccctaattacctgggtaatgtgggccaatctctgcctcagtttccccactgagataggggtgatgataacataccttccttacagaattattatggggttaatatgcggcaagcacacaaacagtgcctggcatagaggatgtcactggtctttattagcactatgacaatggcaaccaacatttattgtgcacctactatgtgccagggactgtgataaaagctttatctacatcatttcaattcttcctccccgcagcctctttgaagtgggggatgtttttctcattaggaagttgagtcctcccaaggagacgtggtaatgggtggtagcaataagatcaggattggggtcagccagatcacaaagccctggcctgcaggcgtggagggtgccacctaccacctgcggatgggacagctcctctgtttctttttactgataattaccctgccgacaacctgatcagttcttttttttttaatcctctattcatctcaacaaaatggaaatccatggtactgcaagggttagaatttaacatgtgtgcacacgtgtgtgtgcgtgcatgcatgtgtgtgtgtgtgagagagagagggagagacagagacagagagagacagagagcaagagtgcacaagtgaaggagaaggagttatctgagaagcctgggggttactagcaccttcatgacagaccaaggaagacagagatccccgggtggggctggctttgagactgcacagcggcagaatcgcttgtgagtcagcagtgccgcagaacagcagggtgctccggaactgggcttggtgtcgtcacccactgccccttgcacagggccctgtgtgccgggaaatgtttgcaggctggacacctgtggttgcttttaaccaggcaagtgagctgggttagaggtagccacatgttcctgagggctcgcagctttggatctgagagggttagacagggcgtcaggggctgagggtcactggaggagaatttgctgtcgtccctttgcccacgggccggctggtcttctcagaccccagaggccagctcctctgttcttccccacctcggaggggagccccagaagtcacagggtcagctgtctgctttccacactgcctagggctttattcttgcaccatccccagttctggccacaccaggggagtgagacatggggcgccggtagaggggctgaatgcgctggtgtggggtaggaggtttcggatgcacattccagagggtgtttatgggggagcagacaagcctggggattcattcctggtagggaacaattccctcagcacccgagggtgggaaatgagggccaaaatggtggctcagagggacacaggtgaggtaagcaggtaagaattcccaccaggtgtctcagaaatgtcctgggaagggcctggcatggtggctcacacctgtaatcccagtattttgggaggccgaggcgggcagatcacctgtggtcaggagttcaagaccagcctggccaacatggtgaaaccccgtctctactaaaaatacaaaaattagccaagcatggtggtgggtgcctataattccagctactcggaaggctgaggcacgagaatcacttgaacctgggaggtgcaggttgcagtgagctggaatcgtacctctgcactccagcctgagtgacagagcaagaatctgttaaaaaaaaaaaaaaaaaagaaaaagaaagaaagaaagaaaagaaagtcctgggaagctggtggaaggaggtcgagatcttcctgacctgggaaaggagggaattcccaggcatctatagaccaataggactgtcgaaagtttgactggtgtgagaatgggttaaggtgctgaattttagatttttatcctctccacggtggtacagtgtgttctgcaaacaaaggagagccagccttgaagagcccttctcagagctgactatgttctttggctcctcagcccagtgagatggccttagctctgagccctgtgcaatatgcaaactggaccagatgacccccaaggctccttctagctctgacaggtcctgtcgggggatccagcctgcatatagggcctgggcttctttcagccccatagatggtgacccctcttcaccgctagtaagattgaagctcatcagcaggacctcaggccctggcctcctttcttcttggtcccttgggttttggagttttatgtgacatcaatgtcccagaaatgcccatcctcttccttttctctcagggcacagtcccctgaggtcttgtggtttatccacccccacccctgttctatgtcctccttcacttgctctcccccacgcccctcccaccagagagtttataagctggctgtccccttgctaacctcctgctgttccctatgaacatgcctgttagatttcaccgtgtgacactgtcttggttatgtccccgtcgtgcctagttcagtgaagaacacatagcaggtgccgaataaatgcactctgctgggataaactggttatctccagagggtggggtctggacagagtggcaaaatagcgatagcatgggatttggggtccaactccacctccacttcctggccgatggcaatctgtcattggtaaactggagccggcatctctactctcagggctgttgagaggattcatggagaagctgtgtgaggaaatgctttgcaggttggaaggtgctgggaacgtgtgtcatctaccctggcctctctctcaggaactcttgcccacatttgtcagcatctgctgggtgtgttgtcttgggagaggtcttgttaaccctctgccaccttgaattctctggtcccctgaaattctttgtcctgtctcacacacaaatgcctccagccctcaggtcgggggtctcctctcctcctgcaatgccttgggcgtgggtccagccttgtctgagacacagagaaatggacctccagtgcggaagatctgcaccaacattcgaaagaaaaaagactgataggcgggagcccagcatttgaatttacagggatgttaaccccaacagcggccggagcagcagagcaggacctgagcacttccttccctttctccttagccttccatgaacatgctctctataaaccctgtcctggtaaatgtctcccctcattttttttttttttttttttttttttttagacagggtctcactctgttgcccaggctagagtaaaatggctcgatcttggctcactgcagccttgacctcctgggctcaagcaatcctcccaactcagcctctcaagtagctgggactacaggtggtcaccaccatgcccagctaatttttttttttttttaattttagtagaaacaaggtcttgctttctcggctaggctagtcttgaacacctgagctcaagtgctcctcccgcctcggcctttcaaagtgccgggtttacaggtgtgagccacctccctcagccctcactgctttttttgccatctcagtgccaccatttcctagctatgtgactttagacgagtcacttggcctctctgagcccatgtcatcatccgttaaattgggttctttggcaaattaaaggatgtattctatgtaaagtgctttacatggcaactggcacatagtcaggcctcaataaatgttaactattattattaataatggccactggccaggcgtgatggctcacacctgtagtcccagcgctttgggaggcagaggtgggcagatcacgtggtcagtagttcgaggctagcctggtcaacatagtgaaactctgtctctactaaaaatacaaaaattagccaggtgtggtggcatgcacctatagtcccagctactcgggaggctgaggcaggagaatcgcttgaacctgggaggcagaggttgcagtaaaccaacacggcaccattgcactccagcctgggtgacagagcaagactctgtctcaaaaaaataataaaatggccactctgagtgcctcagtgaataggctccttactaccttacttagagcagagttgaggaaattggtgaagttcttcactaccttattagccactctctacccaaataaatgtaccccaccttatcttattcattatgggtaatcacctgtaaaagcgttctttatttcattcacagcctgagtgtccccaaaaaggtgctccatgacgtcatcccccctctggaggacacctcctcccacccatggtgatttgagccttctcttaggccagggtgattcctgggggaaccttaactggggctaatgtgcactgacattttgccttttgtgtcgaacacacatcccatttgcagagatttagaattttttgactttaaatgttcgctatttctatgtatgtgtaagagagagttgttttcttttgttttgttaagagacaggatctcactctgttgcccaggctggagtgcagtggtgcaatcacagcttactacagcctcaaactcctgggctcaagcgatcctcctgcctcagtctccccagtagctgggactacaagtgtgcaccaccacacccagctaatttttctgtgttttgtagagacagcgtctcgctgtgttgcccaggctgatctcaaattcctggcctcaggtgatccccctgcctcgaaattctgaagtgctgtgattataggcatgcgccaccatgccagagagagagattttatcttttctacacaacgtgtgtttcccccagaagaaatgccttcctacttctgtgatgaatgtaagtagaatgcagacagaaattacagaaactccctgtgccccagcacccttaccagggcatgcctggcctggtggagtgacagggtgttgtacacagtgaggggaaggaagggagtgggagaggaggtgaggctctgcagagcagagtggaccatttctggtcagaaaacagtgaggaggccgggcgtggtggctcacgtctgtaatcccagcactttgggaggctgaggcgggcggatcacttgaggtcaggagtttgagaccagcctggccaacatgttgaaaccccgtctctactaaaaatacaaaaaaatttagccaggtatggtggtcctcgtctgtaatcccagttactcaggaggagaatcgcttgaacctggaagacggaggttgcagtgagctgagatcacgccactgcactacagcctgggtgacagggcgagactctgtctcagaaaaaaaaaaaagagtaaggaaagcgaagtcctgggttggggggaaatgtagctgcaggcaagaaccaaggaaggtgtggagcccccaacccagtagggaaaaggcttgctgccttgaacccaaagagtgtgagcatcctgtacctttgcagacagaacttccacctactcacaaacagatacaccccactgcacagctaagaaagctaaggggaaaccaggaagaagggaaaagaaaagaggaaaaccccagaggaaacgaggagtcaggcctgggcagggggttccagatgacgcatgaggctgcaggaggaaaaggtttcttttgaaacacatcttttatcctgtccttttccgatgtacgtgagcgtgtgttttggaacgcacataaaacgcgagcgcagtagccggcctctgatttctgccaaggtggacggaaacggaggggcgtgcccaaatgcttcttcttcatggctgctggatcagggaagttttgcttctgtggccgtgaacatggagatttgctgagaggccaaggagagagatgatgggggagggctacttcgggagaggaagtggacaagaccagaggttggaaaacaggggacgggttgatcctaacaacttggagggactggtactgggaataggaggtggggcccagggggagggcagaggacccaggagccccagctgtggacccagggtggggctgtgggcaggtccccagccctgtctgtgacctagggcagtgcttctcaaccttgagggagggagggaggataccacagaggggagggagcacctagaccacttaaatccctttctctgcagggggcccaggcagccttgtttctaagctcagcagggccacttactatgcagccagggatgagaaccaatggcccaccctgctgagtgctggaatgtgtaatgaagtcctgcgtgggtctgtaatgaacccagattcggctcctaacaggtgctgagtgcatgtttgcaaacccaggcgcctgttgcaaggagaggacagagctaaagcaaggagcctgcggaggaatgggtggcagggactgatgaagttgggggaaggaggtgcagaggaaaatgttgaggctcgctctggactgcctcgcctggggatggagaatggggctgcaagggaggggcagccagcgctttgaacttgggtggggcctccctaaatagagtgggggaagtccaggtgctgggcagggctgtcttcacctgcccatcctcagcgccgtggggggatgaggcgcaaagaagccctcctgggaatgtggtggaaatacccaccttgaaaggtagagagtggaatcgttgccctgagcacctgggtgtggtcgcagcatcccccgtgaggcctcccaacctgcagctgcctcctgcgtgcgcatctgccactgctggctttagggccagggccaggcccagctggaggtccaagctggagccctgggcagtgtccagtgcactgtggcctcaaagtgcccagccatggtttagtactccagctggcaaggccctgggttcaaaccctgctctgaatttgtccagttgcttccccatggtgtcatttggtttgttcctctgtcccttgtgttccctgataacaagaggttacctctcaaagcttggttagatcagattaaacgtctttggccaaagaacatcatagggaaggttggggccttcctgctgcatcatctcataccattctactgtcacacttctggtggaggcttttaatgatccagtttcctggactcctctccagaggctctgatcctgccacgctggtgttggagcctgggtgtctgtatttttcaaaaccaccccaagtgatctgccgtagtgtatagcctgcatccctgaccccagtagccagctggtcagggactgtccttggttttctgaagagcatagaataagagagtggatgggacagtccaggtaggtgccagccctggtggccagtgctatcaggtgtgaggcagggagggtggcctctgggcccccataaagaggagaatgggcttcctcagggcagctccaggttcaggtaagagtccttgcaagaccaggagtgccccacgcactgtgctcccggcgtccagcataaggcctggcccagcgtgaatgtttattgaataaagacacacaccaggctggtggctctctgaggagccctggggagctgctctaagagtgagctcccagccaagcagcacagctttgtgtgttccccactgggctgcttctaagattcaaacaaaggactcccaaactgtggagctagcagctgtgttaaaaggcccagagagccagcagggccatggccatcacctgccctcagctcgccgtggagacagcctgtgggacctgggagagacgaaggaaaggactgggcactcagtggggctgctgagggcagtgaaaggaggcagggaggtcctcgcagggaggtcctcgcagggccactgcacctgctgaagcaggtgctagattctacatggaaacgagtgaaagaatccctcctctcaaaaaactcaccatcaatggagtcggtggacaattcacttgagtgcattgaaggttacctgtgacggatgtataagagctggggaaatggccagagggaacaatttgaattggagacattaaaaggggatttaaacatgggaccttgagggatgaatagaagtctggagtcagaagcgaacaagagggctgggcaggctatgtcttgtcttttaccagaactggcttgaagggtatagcaatgtggggacccagcaaaatcctggtgtgggaaccagcagacttggctgctcagaacggcagcctaactctgtaaggttctcatttcccaatctgtaaaatgggagactgacttagggtttggaggggtcaggaaggggagaaatgttacaaggttaaaatgaactaaagatgcaaacatggcttaggaaaaatttgaattagaattccacttagtggagtgggaggcaaagaaacagatggccaagctccaggaggaaaagctggccaagctgagctcaacttcaaggcccagctcgaatgtcacctctttgaaggggacttctttgccttctcccacttccttcccctcagcacacctattccttgaagtcccaagtgggacttctcacactctgcaactgactggtcacctgcactgaggtggggtcactgaggagggtggaggctacatcttttttttttttttttttctgaggcagagtctcactctgttgcccaggctggagtgcagtggcacaatctcggctcactgaaacctctgcctcccaggttcaagcgattctcctgtctcagcctccagggtagctgtgattacaggtgcccaccaccacgcctggttaattttttctgtttttagtagagacaggcgtttcgccatgttggccaggctggtctcgaactcctgacttcagttgatctgcctgccttggcctcccaaagtgccgggaatacaggcgtgagccaccgcgcccggccgaggctacatctcatacatcttgggcacatagtatgcaggtactgaatgaggcccagccttcagatgatcaggtctggggcacttcaagaacgatctgcgtgctatgagagagacaagctctggctgggagtcagcaggcctgggctgtgctctctgcactgcctccaaccagtggaggaacagcagggaaggcacatcgcttccctgggccttaatttccccaaggagctgaactaggtgatgtcaaaggtcccgcttagctttgacattttatgacctaacactgtaatagaatcactaacatgcgtggccatttacagaatgctcctaaagcccttccaggacactcctattgttcccccgcccccgccctactccaatagcaagaaaactttcacaggtggagacttttcttcaacaggtctttattggctgggcacgctggctcacacctgtaatcccagcacttggggaggctgaggtgggaggattgcttgggcccaggagttcgaaacccagcctgggcaatatagcaggacttcatctctacaaaaaattttaaaaacttagcagagcatagtggcatgtgcctgtagtctcagctactcaggaggctgaggtggaaggactggttgagccaagtagttcaaggctgcagtaagctgtgattgtgccactgcactgcagcctgtgtgacagagtgagaccctgtctcaaaaaaaaaaaaaagaaaaaagaaaagaaaaatggcctttactgaacatctatctttgtactgatgagcacccccagagacacctgggcccaccagggtttctagaatgttctagaatgttcagcatcccctgagttgccaagactagacatttagggggagctgtatgacaatcacccaaaactgatgggcagaaatgctgtgaccccaagtaggcctctgggccttgatgacatcctcagtaacagagagcacggcacccctttgtgtgtctgaaggcagagggctgggaccctacctgagcacgcacagggcatctgggctttacctgggagtcctgaactgcgcagcaaagtggagaaacggacccagctctcagcatgtgtccttgggagctgctcccctctgtggtcaccaggcagcacttgcccacctgtgggcttggtgcctctcagggagacgctctggggtctgaagagtgaggtccctgccttttacccgtctctggacacccctctgggcctaggcccttccctgtgaatcccctgcctgaaggaagagacccacagccctggggttcctctggggtgccaagtgggggactgtgtttggtcctggggaggatgggctggggctgctgagcaggccaggggtgcaggacccctccatcccccgcttctcctgtcctcctccttcttccacccttgactcctctcacctcttgtcccctcttccctcctgtttccactctctttcctcctccccaggtcccaccagactgctccatgccccggaccacaatttggctgaaggcaacaatccctctctcgcaccctcctccctttttccaggcttatcaacttcactttcctgtgaaatgaaggggtgggggggtgggtaagaaagaaggaaaaagcacttcatgctcacaacacaacaaaaaacaggtttaaacattttacaggtttcaacatttttcaggcggtcttgtcacatcttatcagatcagccagagccgcaggcaggcgctccaggagctgctttggagaacagaagctgcaacattccagcccaggcactgccccgccctccacaccccttccctcccttcccttttctccccaaagaaacatcccacagggctccctgggatggagcacagggcccgcagcctcttccctctgactgaggtatagtctgtggccaaacccttggctttgagcttctgcccgcaccctttccttctccccacggctgcccagaaccatggtcctcccgggctctcaggtggtccctggcagctgagctgtgccacctcctcggaaggcccctcgtggccctgaaagggaaccttcagaagctgcgggcagaagggagttgctaaagtcgtccacagcatgtagaagtggtcatttggccagcagggctagtgagtttccggggctcctggggcctgtcctcgggggctcctgtcggaggggaaggaatagctttttccttggttatcttttctccgtgtgcatgggtttttctcctatggcgtggatcactgcctgggatatccccttccactcagtcacccccagacctcacctttctgttcctgctgcactcacggtgacattagtgacacaatgcagggtgacaggtccaggaagggctggccaaagcccaaaggctcagagttaagccgaggcaacgtgagggacagacccagaacctggatcccaggacaacagggaagagctggctttgtagcttgtaacaggagcatggttagggctgggaggtcccactgtgtggtcagagaggggtccccaagggaaggcagctgtgcactgaaggcttaggatgcatcataagaaaagcaaaaaggggaggccgggcacggtggctcacgcctgtaatcccagcactttgggaggccaaggcgggcagatcacgaggtcaggagatcgagaccatcctggctaacacagtgaaaccccgtctctactaaaaaatacaaaaaaattagccgggcatggtggcgggtgcctgtagtcccagctactcgggaggctgaggcaggagaatggcgtgaacccgggaggtggagcttgcagtgacccgagatcgcgccactgcactccagcctgggcgacagagcgagactccatctcaaaaaaaaaaaaaagaaaagcaaaaaggggaaagcgcagaggaggtaggggcacagtggctccctctgtgtaggtatgttggctgtgcatctcgtggggacctcgtccggaatatggaaaacacaagccagacctgggcgcctgctgccagtgttggctgggcaggggctgaggtttcgggagagcccacctttccagcctcctagtgtgaggttcaggccctgaagctgggctggctgccccttggcccccagccccctccctggtgcctccaccccttggcatatggcatcaatgctcccaccgtgacgctcagtgtcctcccaccgtgtgcccacagccaagatggggcctaaagtataattcaacttttagctccttacaagcatccccagatggatttctagcttccgtccctctcttgggcccagctctgtctctacgtggtgcctggaagtccctctggccccacgcacttcctcgtcttgttcccaaagctgctttgcttcttaccttcccatcttggtggacaccatctccatcttcctggtcatcctggctcaaaactttggccatactttcctccttcctcctgtttctcatgggaccaaacggctaccagtccttattcacagcttcctgtctgttcctgaagccactgtcctgagatgaccagcgggcccatcccctgccacagaccccggtgacccagacacatgggtcttggcccagctgcacaatgagagctgagccctgggaggttgcaatggatccccaggccccagagtctccttagcatccacgtcaaccccgcctcccagccgctttcccagcacccacctcttgtctcattttgcacataactaacaggatgatattccaaagcccagctaaggaaggtgctagtttgtccgaataatgtctggcactcagggcccctttctagctgcttcccctcctctgcttctctgtgtggctcctagaccctggcttggggaggcatgccaccttgcctggggctgtccccctgccacctggctccacctgagggcccctagccatccttctccagctcggtagctgctccacatggagccctccagaggcagtgaggacacacttgcccccgttcctagagatcgctcgccctgaccatgcaccctctggcccagaggttactggggctgaaagttacaagtgccttgggaccatgtctcactcatttaaggcacccacagtgcccagacctagtaggtgctcaagaaatgcttgttggtctgttactgacagcagcctcctgggctgggtgctcctcaggtgtggcttcattaatctccacgttcccagaacctggaaccctgccaggctgagagtcatcactcaattcgtgcgtgttgagtgaataggcagtgaatgactttgtttaccaaggccagactttaacctgctctctgaaggacaggcacttccactgactccacaaatcaccaggccccagtcttgacagctggggctaaatcaagacaggagcccactgggcttagagcccgggcagctgctccttcatggttttatctcaagaccttgggtcccagctcagggcctgcacccactctaccctcacccttcccttcctgtcctagacataggcaagggtgctcccacccctgctggagatgcaggcgagccagagggccccgttgagagaatgaactagccccgttgagagaatgaactagcccctaatggcaaggcccagagacatgtcccacttctttgatgaaaggcaccccctgaggcaccttggcgctctcccacagccacaggacacagccccacctgagtccctttgggctcagaagaaaccccctacccttggccctgcactgaaatgtcaagaaggtccagacctgtgctcagtacccgcagggtgcacatgtgttccaggagggcgaggaacagtggcagctggaatcctgagctaggtttctctggttttgtcacaagctccctgccaagcagccaggtgagcggctccagtccaggcctgtggcctccctcatccacagcagtgattgcctcgtcactatgggtgtagttgggtgcatcagagcccaccaggcccagccccacggtgtgcacacatgcccctgaactggctaggcttcctgtcctgacatctgccaatcctgaacggcttcttgacctaagtggaaaggtagaggcctgagttccaaagccaacgcttggttcctcacttcctgctctttcctcaaacctttcctttcccttctagaagtttccgtggagggtggagcccttctgggcccaggaacaagttgggcctctgtccagtactgcccaggagccagcaggtggagcacctggccctggcctgttgtggggttgacaggagcaccgtggcccccaccacagggagaggaaaatgaccacaggagaggtgatttctgactccttctcctcaccttccctcctcctctccctctcagcagccatgtcagtcattttaagagacactagatcttcagatcagagtcttaagatgccttccctttgaggctggcacagatggttagatttccgcatggagaaaggtaagggcaaagggcctatttctgcaaagaaggcatgacttggggagacttggccctggagagcaccctgagaccggagggaggaggggagcctttccctgggccgcagcccctgggtccaccttctgcagccccacccatgtgaagccaggtgggtcctttttgtgcccagccccagagaagcttctgagaatgtgcattcatcacccccaggttaaaagcctggtgggtaaaagaactgtgagccctgggttctcctcccacctcctgggcagccagctgtgtgaccccggaaaatgacaaacctctctgggcctcaatcttcccgtatagaggaagagggaattagactagacccggggctctggaatttcgtcctgcacaggggctctaggtgcaaagttgaaggctggggatgcaagcaccatccctcctttgatttttttaattttgctatttaaccattttaaagtgtactattcagtggcattaagtacattccaatgctgtgcgaccatcaccaccgtctgttttcatcatcccaaactctgtacttattaagcagtaacttcccactccctcccttccagaacccctggcaacctctgttctactttctgtccctgtgaatttacctagacacctcatgtaagtggaatcatacagtgtttgtccttatgtgtctggctgctgtcgcttagcttcttttcaagtttcttctatgttgtagcttgcatcagaatttcattcctttttttttttttgagacagagtcttactctgttgcctaagctggcgtgtctttacctagaacttcatgtaagtgaaatcatacagtatttgttcttccgtgtctggcttctgtcgcttagcttgttttcaagtttcctctacgttgtagcttgcatcagaagcatcagaatttcattccttttttttttttggttggggggacagagtcttgctctgtcgcccaagctggagtgcagtggcgcaactggctcactgtaacctctgcctctcaggttcaagcaatactcctgtctcagcctcctgagtagctgggactacaggcacgcaccaccaggcccggctaatttttgtattttagtagagatggggtttcaccatgttggccaggctggtctcgaactcctgacctgaggtgatccacccgcctcagcctcccaaaatgctggcattaccgccaccacacccgcttccttcctttttctggctgaatagggtcccactgtatgtatgggccacctgttgtttatccattcatctgctgaggactcttgggttgtctctaccttttggctgctgtgagtagcactgccgtgaacactggtgtacaggtgtctgttggagtccccattttctttcctttttttttgaaacagagtcttgctctgtcacccaggctggagcgcagtggcgccatctcagctcactgcaagctctgcctcccaggttcatgccattctcctgcctcagcctctctgagtagctggggctacaggcgcctgccaccacgcccggctaattttttgtatttttagtagagacggggtttcaccgtggtctcgatctcctgacctcgtgatccgcccgcctcggcctcccaaagtgctgggattacaagcgtgagccaccgcacctgggcggagtccccattttcaattcttttgggcgtataccaggtgtggcattgctggattatagggtgattctatgtttaactttttgagggacagggccctcttttcatatgttctgtatgtaggggagaggagggagattgtgtgtgattccatttgggaggccacctggttgggtgcaggactgcctaccctaatggatcactcaggggagtgggtgctggcagcacagtgggtgtccctggcagcacagtcagacccccatcagcaggggattggccgtcactgggtggacggcagcatctgaggccaacaaccccagtgtcagatcaggcaggacgcactgtacagggtgcctttaggtgtctcaccatatgttaggtgcgtaagtcaatgcagcatccaggctgacctgaattcactgattaaaaatgttctctaaaaatgttctctatggccaggcatggtggcttacgcctgtaatcccagcactttgggaggcagaggtaggtggatcacttggtcgggagttccagaccagcctggccaatattgcgaaaccctgtctctactgaaaatacaaaaattagctgggcatggtgacgcatgcctcttatcccagctacttgagaggccgaggcaggagaatcacttgaactcgggaggcagaggttgcagtgagccaagatcacgctttgtactccagcccgggcaacagagcaagattctgtctcaaaaaaagaaaaaaaaggtcctctctgccttgtgctcaccatgcaggcctcctgcagccctctggccacagcaggcgttatcagggtagaggcacagaactggggtggggatgggagttagataaggccatgcacaaggtttaggtcttgcctatttgtggagggatatttcactccaaggggtcaacaccaaagtttccacaagcagcccgttgtgcagggcacccgcagcccatccgcctggctgcccgtgtgtgtccttggcccagctgggcagtgggtggtcggagtggaggatgagccggcttcaggaggagggtggcagggtcctagggaagggaagggccgggccaggagctgggtataaatagcccctggcccagctgcgaaggcctggcagggtcctccgccctccccctcaccagctgtcagtgccaggcaggtctctatcccccttgggagcctggccatcatctcagatcctaaacgtaggaacttcctgagcggaaccaaggagtcttgtcctgtgtgtaggcggaagctccggatgccgggaggtctggcgagtgaggggcatcaggctcgtcctttggaagagttcttcattcctttcctccagaatcatgaatacctagcatgtgcccggccctttggaagaccgagtgggctggggtgtgtgtgttgtgtgtgtgtgtgtgtgtgtgtgtgtgtgtgtgtgtgtgatggggtagggaccggggaataactggagaaaacactaccactacctctcttcttggagactgagactggcatagccagatggaattggaaacaaatcagttcagcactttgggataagaaggtttgaattaggtacaggaaagattcaggcggaggagaggtgacttctgtctggagctcacagaaggctttagaatggtggtgacctaggaatcaggtttcgaaggatggtgtagaatggttgccgggggccgggcagtggagaggtgcttcgagccgagggctcagcatgtgcaaatgtgcagaagtgtgaaacagccccgctggagtcattcagctggctaggcaaatccgtcaaagccacgcacactttggcacaaagaatcgaggagcatgagagtcactgtgccgcctcccgaagtggaacgtgtacttcaataatggggaataggagtggcgagttaaagtaatgtgtctgcgatggtggaatttcagcagtgtgcgggcaggaggctcagggtgggggtggccgggcatgtttggggaagggcagccatcctgcagaaatcaatcccatggccacagcctctttagtctccgacactggcccaggagctaagccccatcgccagaggccttgctaattactcgcaggatgaccccatctgaactgaagcctttgaatggagcatcctgaaaatgtccttttgcctgcactctttgagtgaccttgaaccctcatccagatcacaactgtctttgttctgccacccctgtgaggactgaggtctgatccaggcatcctttccagtgttggataggaaggggctgagatttctgatgtgttctaccaagtcagggatgcaaggatgggagaaatgaggttggtgacaaggcagggaacaaagtgctggggacagctccacacacaccgtaaccatagcaaccaccatctagcaagggctccccacgtgccatgcactggattgtgtcacttattcctcctgtcgtgtctattttaccgataaagaaactgaggtatagaggttaagaaaattgctgagatcagcagctaggaagtggtagagctggatgggaccctggcaccatggctcccaggtccacagttggtgggacctgggcaacaggaaggagacagggtttggtggaaagagggaaaacagctcatcatgactgaggctcaggaattgttctcagaggacatcacactgggagtcagacaaactcagggcttgaattctggctcagccacttccttgcataagtcgcccaactactccatgcctcagtttcctcatctgcaaaatggggataacaatgcccacctcccagagttgttgtgaggattcagtgagattatgtatttgaagtgactggcacagagcaagtgctacataaatagttgtcattagtattgccagtatccgggtaactgtggggacagaaggaaatccctgtggggcagaggagagactgcgtctgcacagcaggaagggctcagtggcaccttcttcctggagatgtctgggaagcactccgacctttgaggccaatcaagccatgcaggcagtgtgccagagctcaggtgctctgctgggctgcgaagacccacctgggaccctgagggaggtaactggtgaaaccaggaagcagggagccccttggagagctgggtgaggagccgccttgccagcatgggccccccgactcctcagtcccccaagccagccggcctggctttctctgtggatatggctgtgtgacctcgcacaagttggtcctctttcacggcctctgctttttctttttccttttttgttttgagacgaagtctcgctctgtcgcccaagctggagtgcagcggcatgatcttggctcacaacaacctccacctcccaggttcaagcgattctcctgcctcagccttctgggtagctgggattacaggcgtgagccacctggcatggtcggcctctgtttttcatctgtataatgggctttgtgctcccttagggctcctcctgtgggttctgctgctggaccagggctcagcctccagtttagcttgagggtgcccaggcctgcagaaggtgtcaagcaagggctgggagagggggaggaaggaggaggcaggaaggcaacgggaggggaaggaggagggcagaggaagggtctccgagtgcctctcactcccgcctcagctctccgctccagtggtcccatatagggctctgggtcccaaacaccagaggaaggagcggggacagcccaggcttcttccctgggtcttgttcctgagctgcccatctaggatggtgcaaggccgagttgtctgcactgaactctccctcagtttcccctccagtgattgcagggctgtgggggcagctggcacagcagggctgggctggagatgctgcttaagagcacgggaggggcagcctgagcccagagggaggctcaacggggacctttgcagcctggcagacagggcagggtacttagctccctggcctcagtttccttatcttggaaatgggacaatggcgatgataatgaagtttttattacagacctgccgtgaggattacataaggtaacagacacaagcactcagaactgtgtccagcacatgataggcccataataaaccacagggattatatgatcactctaacctgcttctaacagggcaggggcagtgctgtgtgcgccgtgtgcccatcagggctctgggctcactgactctacccactcaggcatgtgctcagtatggaggcccagggtgcagatgggccaggcctgaagccaccttcaccccatgaagacccaggcaggcactgcccagcaggcagggtcacatagtgatgacccccatgggctctggagtctgacaccctgggttccaaccagcaattccataggagctctgtggtctggggtgcttcatcaacctgcaaggctaagccatctgtaaaatggggctaataatgaccctactttgtgctggggctattttgaggattaaatgaggcaaacccaaggaaaagcctctgctcagggccaggcaccggggaaatcagtaattagccattaccaccgataaatcagaacttctgggccgggcgtggtggctcgcgcctgtaatcccagcactttgggaggccgaggtgtgtggatcacgaggtcaggagatcgagaccatcctggctaacatggtgaaaccccgtctctactaaaaatacaaaaaattagccgggcgtggtggtgggcacctgtagtcccagctactcgggaggctgaggcaggagaatggtgtgaacccaggaggcggagcttgcagtgagccgagatcacgtcactgcattccagcctgggtgacacagcgagactctgtctcaaaaaaaaaaaaaaaaaaaaaagaacttctggctgctgcttctttctctttagaaaaagctcagtgcttaagacctggaatgcctcacagatgttaccatccaaactcccagatctggctcctcagttcctccacccaaaataaacaaatggaaaaaggagaacctgcctctccccctgacaactgagcctggagacaaccaaggtggatgggtagcatgcccctgcacggtgcccagggagctctgtgccttggagtctccacgaattggccaaggccaacatcaagctcaagtatggaggagggacccgggggaaggcacatggcactctctgacccaccacagaccaaaaagccgtaggcaagctaattcactctctaaacctcagtttcctagtccaggagatagtgatgttcttcatgtttgggaattgatcagaaatgttgtatataaagtgcctggcaagcagtaacagttgccaaatggcagatgtttggctcggccctgtgtccagcccagaagcttttgtgtactaaaaagcacacaaaaaacctcaccctgccccatggggtcttctcccggcccctctttccgaggcttttgcccatcactttttgtgggaaacttgacttaggccaatgctggaccaaagccttggtcagtgctggacacagagggagaggagatgggccccttcttccagctcacactgcccctggtcatagagcagattgcaattgtccttgaaggccactgacactcacggatcattttctcaggttctcccagaaaatgtcatttctgctgttcctgtgctgagggcagggaacggaaaagtcgtaattcctaccttggttttctagtattttaaactcttctgccccacccccataaggtcattctttctgttgttgactataaaacctgagagagttgatgggatattgattacaaagcgaggggcagaggaatggagtgaattgaccagtcacctggtgttgggtgtgggcagtgagatctgagatctcccttctgactctgtgctaaacttgttttgacacaaagccaagctccagtctctcatgagaaaagaggtggagctctagaaacttctaggaaactggaaagatggtcatggaggccctggtagacaaaggacttggtgcaagccagcaattccttggggagatactgggaggctctgggctgggctggcaccatcgcagggaagaggctgagggcattgccaagggtagtgtgtgtgtgtgcgcgcgcgcgcgtgtcccatgagtcactggaagtgtccatgtggccccagtatcctggactgccttggaaattgcccagcctgatctcttcaatgcccatcagggaagctggacccagaacctggaaaggactggatctgggccccaaataccatctttctagtccaaacctcttttcatggctttgcattgcccccaagggcccccacaagcggcttctgcggtcccatccccctgcaagctggatgcagccagagggctgacttgcgtgggtcagagctctgcgctttgaggggcggcatgctcccgaggtcaaaggtagcacattcaggtgccagggcacaggccctctgcctctccacctaccccggagggttcacaaagcggccatggtgcccaggatgggctctgtgctttgtgcccacagtgttactaccctctgtctgcctgcaggtccctggccctgggccagcagtacacatctctgggctcacagcccctgctctgcggctccatcccaggcctggtccccaagcaactgcgcttctgccgcaattacatcgagatcatgcccagcgtggccgagggcgtgaagctgggcatccaggagtgccagcaccagttccggggccgccgctggaactgcaccaccatagatgacagcctggccatctttgggcccgtcctcgacaaaggtactgccttggggctgagggggggggaggggctgggtggggggagggatcaggactgtatgcccttccaccccagtcagggtgcctcttctctgaagccagggtccctctgggagggtgataaatttggttgcatgactgccacaccttcccaggcgctgctgggggctgggccgccttgagatgctccaggatcctgaggtttgagggccgacaccaagaaggccacagacttccttcctggcttttgcacagtgggcgcctcaggctcctgctgtggacatttgtgacatttccccaatgctgtgttaagtgctatgcaaataccgctttggggtgggggtgagagcattgccacccctaggtccctcccatctagaaagtcctcagtaggtgaggaagctgcctggtgctgtggtagcattgcgttgcccccaagagcccctctgggtttctgttcatcctcatgccctgtcagctggatatgcccaggaatcatggtggggctagagggtgcactggcctctgggtaactttccggccgtcttgcagcctgggagtctaactggctgtgcctcaagtggacagggaaccacatgatttgactttgaacctgcaggccctgggagggaggctaagtgggacaactcctcccaagaaggggacttgggggctcatggactgggtggaagatgggcagctctttgtggaacggcagtgtccaggaatttaacgatcctggccgggctggccacagccagagttgctctgccacccaaaccgctgagcctggccctccctcctattagaagctagggaatgaatgagagctgcctatacagccagaaagaaaagggatctgacgttcaggtgaaggggtggggtgctgggtggggttgggggggaagctgacaacccccattttagagtgcagttcccctttaccggtgcctcaggtgctcagggtctgtcccacctacaggcaaagtgctggctattgtcatgggacaggagggtaattagcaaatcaatggatgatgattctgtttacgcttctattgccaaaactaattattccttgttgacataaaagatttggcctcttaattggggccaagtggcggcggtttgcatttcaaactcgttcttgtcggtgtgttggtctcagcgctttccggtgcccctcctcgggccaggtagcgctgaatcaaacaaccctgcgtctagacgcgctccccaaaagcgagtcacctctgatcgctcttcccgtctccggccaagagccaggggaaagcggctctgggagcgctacccattcactccgcgttgaacgttttaagtcaccaccgtaggttctggcacacgccccggtccctagatggcccgaggacaggtttgggttgcggggggaggggcgatgtgtgcccgagagtttgggaatttgctggcggcggcgaggagagcatcccggaagacgccgcgagcgcatacgcgccccggtcggtgcccagagcccggaccttgaacccaggttcgcgcccagctccggccccacgtttgcaccccgcccccggcgagtccccacaccaccgccgcgtgggcggccaagggttaatctctgccccgcgctttgagacccggggcgcagcgggtcgggcagcccggggcgcgcgtcttccgcgagtctgggggcggcggggtcggcggccggaaggggcgaggcgcggcggcggcgcggcgggcccgaggcgcttccccaggcgggggcgggggcaggggcgggggcgggcgccggaggggcctgggcggcctgaaaagcgcccgagcaccgcccccccaccgcgcggccgccgcgccattcacacgccctctggccattcggcgcggcgcggcgcggcgcgggggcggggggcgccgcttcaatggggatttcgcggcccggcgccggggccgggggcgcggcccggccgcgggagccgcccgttgctacgcggtggcggccggcccggcggcccgggcccggcggccgcattatgcgggtaatgcggtgtgacaccgcgcgaacaaaggcggattgagcggcccagcgggccccgccggacggggaaggcacagcggggctgtcagcgccgctcccaggctaatccccgccccgcccccgccgcccccgcgttcccggggctgggaacccagcgcggcccggggcccgggcgccgctgccgccgcgagaggccgcaggccggccggaaacgaggggcgcccgccctgtgaacccgccctcggcccctcttccccgaggcgcccccagggctggggcgtctaggattggggcgagtgagcggcgcggctgggaccccgaggccgggagcacaactggacgcgggacgtcgggcccccttgccgccgtcctcggtcggccctggcagcgcaggcgcggggcgcgggcgggaccagctctgcactcttcgccctcccgtcgttggaagtgggacgggcccctctgtaggtggctcaggagggcgtgggggccgcggagagcggccgcgggagccaagaggggtcccgggcttccttcttgcagcactcggccaacagcccaggaggggaggcgggcgcctggcttctaaataaatttggtcacatttatgaccaattttgccgactaggccggcccggcgtttcacagcctgtgtcaggtggcgagtcacctccggctcccgggtcctgccatgaggagagagatggttgggctgcaggtcttgcaggccttggcctccctaatcgtcaatgtccacatctataaaatgagtaaaactttccatgtgaatgaagcacatgcagagacgatgaccgttgtgaggaggctggagcacacccttgagagtctctcctttccctgcgctggaccctgggacagaaccaggggaactgcccggtgtccctacccttctgggagggagttggccgtgcctgggcgtgagggcaggagaatggggatggggagactgaggcacgggccactgccctcctggtgaggggctctaggagcggagggaagccgtgtccattttacaaaaagggcgactgagaccgagaaaaggagaggggccgtccctatgcatccacgtgcggaaggggtgggcctgggcaggtttaggctgtagattcccaggcctccctccttacagacctggatctcactcaggcgtgggagggctcaggcctgtgcagggtggtctctggactttgggaaggtggagggcagggggtgtgggaccaggacagaagtggctgccttatctctgcagcaacctgccagagctttggtgtcggcgcctgtttctaacaggcactgctttgccctgtggcatttgaggtcctgagctaatcagcagcccagggcctcagtttgctcatcggtgaagtgggaatacccaactgggtctaaaccagccaaagagggtggggaagctgcctccctcttgcctcagggctggtgagctcttcaactcttcctggcctcgttcccctcacgtcctggcctgggaggtggaggcagggcaggcgctcccaggccgggtcctgagtgctgcctccccacgacctccccgcagccacccgcgagtcggccttcgttcacgccatcgcctcggccggcgtggccttcgccgtcacccgctcctgcgccgagggcacctccaccatttgcggctgtgactcgcatcataaggggccgcctggcgaaggctggaagtggggcggctgcagcgaggacgctgacttcggcgtgttagtgtccagggagttcgcggatgcgcgcgagaacaggccggacgcgcgctcggccatgaacaagcacaacaacgaggcgggccgcacggtgagcccggctaccctccccaaacccttcagggagcagccccccgcttcccctccggagctgccctggcccccacctcaccccttccggcagccctgtgggtcgcgggctccttttccccttggccaggcttggcctcctccccaccccacagccacttcgtctgtccaccctccttcctccttgggcagttcctggactccaccccacccgggatgagtcggcctgggagcatggccaccccgtgggatcaggtgccacccaccacccatcctgtgcaccttggcacgcggtgtagggctgtcaagtcctgggaacctggctttgaattcagcctccactcccttactatgcttgtatgatctagggtgagtcacgttaagttcccagcctcagtttccccatgtgttaaatggagataactcctatttcttttttctttttcttttctttttttttttttttttgagacggagtctcgctcagtcgcccaggctggagtgcagtggctggatcttgggtccctgcaacctccgcctcccgagttcaagcaattctccggcctcaacctcccaagtagctgggattacaggcgtccgccaccacaccagctaatttttgtatttttagtagagacggggtttcgccatgttggccaggctggtctcaaactcctgacttcaggtgatcctcccgcctcagcctcccaaggtgctgggattaccaccgcgcctgggcaacaactcgtatttcatgcgctgtgagaagtggacgtgctgtctacccatgcttggggtgtgaagggggagggaaacatggtcactattctttaggtcttgcctcagtccccatcagttctcttcctgtcacagaggagtagagaaggctggagggaagggggtgggcagtggcagagagggaaggcctggatgtgccccctcgtggggtcggtctgttggccagctgccacttctctcccccagactatcctggaccacatgcacctcaaatgcaagtgccacgggctgtcgggcagctgtgaggtgaagacctgctggtgggcgcagcctgacttccgtgccatcggtgacttcctcaaggacaagtatgacagcgcctcggagatggtagtagagaagcaccgtgagtcccgaggctgggtggagaccctccgggccaagtactcgctcttcaagccacccacggagagggacctggtctactacgagaactcccccaacttttgtgagcccaacccagagacgggttcctttggcacaagggaccggacttgcaatgtcacctcccacggcatcgatggctgcgatctgctctgctgtggccggggccacaacacgaggacggagaagcggaaggaaaaatgccactgcatcttccactggtgctgctacgtcagctgccaggagtgtattcgcatctacgacgtgcacacctgcaagtagggcaccaggtagggctccgggaagcaggggggaggctgggagcctgggcgcagggaatggggttgtttgcccatctcgtcttcttgacgacccccttctgtttctaagctatccaagacacacaagttcccacagccaaaataggaagctaggatttttcaagcatccgtgggaatggtccttgggcagagacttggtggattgcacaaagcacagataaaaacccagtgttggccgggcgcggtggctcacgcctgtaatcccagcactttgggaggccgaggtggacggatcacctgaggtcaggagttcgagaccggcctggccaacatggtgaaacccgtctctactaaaactacaaaaattagccgggcgttgtggcaggtgcctgtaatcccagctgcttgggaggctgaggcaggaggattgcttgaacctgggcgacagaggttgcaatgaactgagattgcaccactggactccatccagcctgggcgacagagtgagactccatctcaaacaaacaaacaaacaaacaaaaaaaaacaaaattcagtgtgtgcacattaggtgccagcaattgattaacatttttacacaagttagttatgagccagatcaaatttttgcatagctgctagctgtcattcttgagcattatttggagatggggggctggaagctgggagacctgacgtctggtcctaactttgtcagtaacttcctgttctttcacttttctgggcctcagctttcttactataaagtggtgatggtggtgaagggcagggggcagtttaaatacctcaagcagcgagccaaaatgtctcctctacccctgaggcagagtcagtgtgcatccaccttgaacttagagggcaagttcctgcacaagcataaatcgtaccaacctcagggaggtgggtggggggaagcggcatataagcccatatcctgacagatctgaagcttgggtggagtggggagcactctcaccgagtttatggatgatgacggggagcaggagggattcaagttcagagtggctgggatgagtaatcgagggatcaaaggcgggtggattttgttcccaagcttcccagaggtggcctgcatgggaggcgctatgcactggccctgggttccacagcaccccgggataggtcagcatggatgaggagtggtcctggacccccggggtggaaggttttaaggctggggtgccctttcttccttttctgtcccctgagaaggagcctagtgtgtcgaggcatgagcatgggtgttggaattaggccctgccctgctccagctcctaccacttgccaaccgtgtgacccaagcaagaaattcttcatagacctggttcctcatctgtcatcctccccagagatgctgtgagggacaaatgaaaggacaccgaggacagggcttggttaattgggaagcacttccctgctgggtcattgttgtctggggtgctgctgggcgagagcagcctgtgaaagggtagagtgccccctcttcctgcagttccacagggcacctctgagctactggcacatgtctgtgccatagggagtaggggagggaagtggacgggcctctctgagatatgggaggtacttgacgtcatggagaagagctctggctgaggggcgactcactcagcccatctaggaagcccctcggtgtagctcaagttctgtcctggtggggacagtccagaaaggcagcaggtggcactacctttgtcggtatctgaacaaaagcagtgtggggagtgggagaggacgaaggtgaatccagcgcctccactcgtccactcagctgtctggcctgggagcgccagtttcctcctctgttcagtggtggtgacaatgggagcccagcagaactttttttttttttttgagactgagtctctctttgtcgcccaggctggagtgaagtgcgcaatctcggctcactgtaacctccgccacctgggttcaagcgattctcctgcctcagcctcctgagtagctgggattataggtgcccgccaccacgatcggctaatttttttatttttagtagagacgggtttcgccatgctggccaggctggtcttgaactcctgacctcaagtgatccacccgtcttggcccctcaaagtgctgggattacaggcgtgagccaccgcgcccggccagaatcagtactcttcatcagccctctttctccccatttctgaaatggacaatgagtgttttttttcctcaatcttatgtaaagtgctacatagatatggtttcaagatgctgtgtccaagtggttcctacccggaaccccttctctgtggaagctctggaggcctcactctgtgaccagtggaggacactctcccaacatggtgcccttctgataaacactcccaggccagctcttctgcctcgctgagccctggcttcttcatttgtgaactggggatgagaactgtgttctgtgtagggttgtcctgtggactggagaccctgcacatgaagggcctggcccaggacccagctgctcacagggcagccacagaggctcctgggccaagcagagctgacctcccagagccacctccccaggcgagagccgcctgctctggagcaatgggcccaggctcggccgagactccgctaggcaagacgggagcctgcgggatgcactggcagggatggcaggggacagagtcgttagctgttctcttgtcttccctgacagtcttggcagtgcaggcaggagagagaagggagtcgcagagcaggccccgggccctccacacggtgaggagagagcgcctgtcaaatggcttgtgtccttcctttgtggggaaaacaccttttctgtagctttttgtagcttttacccagtgtctctggctaaccattgatttggtgccttacaagtgccagatttattcctcgtcactctgctgttgtgaacatggtgagctggagctggaaaggttctggcaagagtcgagtggcctggctgcgcccaagtcctggatctgttactgccttgctgagagaccttggatgtgtcccttcaatctggctgagcctgtttctgcctctgtaaagtagtcttatcttggccttgtcagccccctagaagagctgggggttgactgggaatgcctcaaaccctttgtgagatatgactatgcaaatgagtaaaatgaacacactgctgctccaatgggaaggaattgttcgtaattaagtaggctctctcccatttggacagctcattatcaagctatttggtgcggtacaaaaacacagtgcatgcctggcgtgagcccagcacagcagttgacttggagttggggactgggccctcggccaggcaccgtttctcccatcctgagtgacctgctcctgggcttcctgttgcccaaggccctcagctagaggtgggggaggtagaatttcgatcccattctgtggactcgaaagccttactgctcctgtgactcatacgacctccctcaacagcaggcccaaagcacagaggagagcgtggagaaaccacccaagtcctcatcacctctgagcaccagggacacgttcagatccatcagcagcctctgatctttgaaccccaatgggtggtctctgggaatggaattatgtttctaattcttcctcttgattttccccaagggcgctgggaaggggtgaagtgtgtggctgggcggattcagcgaagtctcatgggaagcaggacctagagccgggcacagccctcagcgtcagacagcaaggaactgtcaccagccgcacgcgtggtaaatgacccagacccaactcgcctgtggacggggaggctctccctctctctcatcttacatttctcaccctactctggatggtgtgtggtttttaaagaagggggctttctttttagttctctagggtctgataggaacagacctgaggcttatctttgcacatgttaaagaaaataaaaatgaaaaaaaatttgactccaacagaacaggctgggctaatgtgagctctcagcctggcagtcaagacatcagcatgggcaaggttctgtttccaaactgctgcttctggtgacattccaagacgcctggagggtgggagtcaggaagtaggacacacccctgcagtctccttttcttggtccactcccattcaaatttgagctaatttctcattctgataaaagccataggtttagctaggatgaagtggtaggaaggtccgtggcagttgttagagtaggatttggagtttggaagaactggcagctcagggtggcctggtcagccgtttgaagagcagccatgtgttcttctcagtctcattttctctataaccctgttctgcacgaggggcagtcagatctcaaaatctttttctaccattctgcagtttccaccgtcaatgcagttttttttttgtttttttgttttttttttttttttggtggtagtggaccttgtaaataggctatgtaagggggcaagtcttctctagctcaaatggcttcctaaataaataagcggtatcttcagaaggggccattcagtccttcccagccctgctcacctgcagattctctgtacaaataactccaggtagagcagttggactccaggtcaccttagtataagttagacaaagggtccgtgagggagtagccatcaattcctgaaattccaactttgtgactagcagatggggaggatgaaaaccatccctttgcttcctctccaatacggacccatcttactgtgtcctttcctctctggggccaatgtgagtaaacacagacacagagttctttcccccagctcttcctccctcacctgcatgctgagatagcttccatccatgcagttcccaaggatctggattagaagttcaaaggggaaccagcagtcacctactcccttaggtgaagcatctcacggctgagttctccctgaggcatactggtccagctgagcgtcctagagaaagctagcaaaagggaggcacatggatttcacagtatgaattggttcaacaactgtcttagggagaatcagaaagaagagatgcagcaggggaatgagcagaacaaagatttttctttctcccccttctctctggggtctacctaaccctgacctaaaataccagggcagcgatctcccagctggtgcaggtgggcttgccaagatggtcgtccaggagcccgccttcacttctaaatctgctggccacaagccctgctaaagatacacatctcaccccctccgccaagtctgaaatgcccctccccatctcaccttagactgaaaagttttaaatcatgtcaactggataatacttgctttatgtgagaatacttcagcagaatggatacgaattttcaaaacaatcttttcatatctatgtattctatattaaaagtgataaagtcatgtttctggggcgtattcaagtagctgacaagtaattatttaataatagtacatgagtgcattgtaatgattctcgccgtagtcaggtaatagtatccaaccgaaatttcctaccaacctgctgtatccaaagttttgtaaaaagttgtagaagttgttgatctttttgattttatattcaaaaagtctctttttataaatattatttattatacaatgtatatacctttgagttaactaagattatatattatataaatatatatatatttggagaaaatatatttcatcatgcagtttttttctgttaagtcattaaagagaaggtaaacaaacctaaaatggatacattgtacactgtgtggagtttccagattaatgctcaggaggtcaaggatacgagattctgaacatggtggcctcagctaattaaatgaccaagtgaaggttatttcctctgttttctaagcaagatcatcagagatgtcacggacagtgggtctgatacaccacagtacatttttaaaggcttcttttgttctaagttaacttctaacaatgaatttccagttttagaaaacaacaacttgtgtactaattcatttcacagactcaagtattttcaatgtataaattaatgtcacaggcactcctaaaagatgtggcccaaggccagcagaccgcaggggtggccactgccttaatcccctcctcaccacgttttcaactccatttaatgggaaaataggattttctctattgaaaatgaaacttgactgaaaattgtctgtcccctgctagctccactgtgagagctaagccgtagagggaggtaggctggtctacaagaagaaagcgtgtgccctgggctgtgggctgtctggaacaattgtcatttgaagttgggtttgggtttgggtagaaagggcctgccagtgggcatgctctggggatgggcaccctctcagatcgccacttcacaggacccactggaagctcacaggttatgccttctcaacaatgagatgccacaagttggttttatgacaacagacaatcctttagttttcagacctacccataaaatgtcacctttggtttattcagcacattatttcagagaataacaaaaatgttttttctttttatttctcctgacctacctcatttaggaacaaatcttacctcactacgaagagaaataatgagaacaggctgggtggggtggctcagacctgtaatcccagcactttgggaggccgaggtgggtggatcacttgaggtcaggagttcgagaccagcttggccaacatggtgaaagcccgtttttactaaaaatacaaaaattagcagctgggcatggtggtgcatgcctgtagtcccagctacttgagaggctgaggcaggagaatcacttgaacctgggaggcggaggttgcaatgagctgagatcgcaccactgtactccagcctgggtgacaaggcgagactccatctcaaaaaaaaaaaaaaacaaacaaaaaaaaaccaggaaaataaagccatgagccgcctatggtggaggcgggctgctctgcgctgtattcagacctgtgacctgaggttaggaatagccaccagaagttgatgcactctgttttgtccatgatgtgtctttagcccctgaaaagctgaaaccacaaaaactgttacacttcagccatacaacgaatcggacacgtacaggatacagatctcctctacatcttacagtctggtcatttttatttcatttcgactttttatttttcttttgcataaagctaatgcaggttgactacaccttttctgaaatgcttgggaccagaaatatttcagactttggaagatttgcatatatacaatgaggtatcttggggatgggacccaagtctaaacacgaaattcattgatttcatatgcaccttacacacatagcctgaaggtaattttatgaaatttttaaataattttgtgcatgaaacagtttagactgcattttgaattttgattgccacctgtcacacaaggtcaggtgtggaattttccacttgtggcatcctgtcggtgctgaaaagttttagattttagagcatttcagattttggatttttagattagggatgctcgactgaacttatctatcccagaattctaggtactttttcctttttttttctttttttttttttttttgagatagggtcttcctctgttgcccaggctggagtacagtggtgtgatcatggctcactgcagccttgacctcctgggctcaagtgacctcctacctcaggctcccgtgtagctgggaccataggcatgtgtcaccatgcccagctaattttttaattttttttttttagagatgaggtcttgctatgttgctcaggctggtcttgaactcctagcctcaaatgatctcccacctcagcctctcagcattgggactacaggcatgagccaccctgcctggccagtactttttcaatcaataagattgccaaatatttaaatggtccctattcatactaatgaagaccatttgtaatcgtatgattagtttttaatttttaagagacaagtgtctatgtcactcaggagtacagtggcatgatcatggctcaacacagccttgaccccctgggctcaaatgatcctcctcagcctcccaagtaactaggactcaggcgcactctactatggtaattaaaaataaaatcttttgtagagatggggtcttgctgtgttgcccactggtctcaaactcctgggttcagggggtcctcccacttcagcctcccaaagtgttgggattactgggtgagccatcacaccctgcccagtcttatttgatggttaaggagaatacagttgatagctgtgcttgaacatgtagtttctccttatgtataagtacttacaaacgtctaaacacaagaggacgttgtttaaaaatctgaaagagacgacataattagaagatatctttcaaagcaatattattttatgaagaaagaagggaaggaaagcatgtgagacagttcaaggatgaggggatgaggtacaaagaaaggtggaaggaaagaaggtagggaaaaagaaaagcaaggaaacatgatggcgacatgattcttggtgttacctaatgccgtctcccctggtggccctgggcatagggacatgttcttgtgtgtgtggctggtctgcacactcgagtgaagtcagtgcagctacgcattgctgctacactgccactgtttctcctagtttaatagagaaccttctaggaggcaaaaatttcttaccattaatcttatactcccaaaatagtgagacagaagttgcatggcgtctacgctgggaaaatttcaaacatgatccctccttggatattttgtcttcacccacttgggatgcttgccaatcacaggcgctatctcccgcatctttatgccatggtgcccgtccagcacacacccttgtgggctcgtctccaggacccagtctcagtacggcttgccagctgatgagaaactctacatcattttgcaataaattctgcaacttacctgctttcttgaactctcatacacacccttccccagtcacttattttatttttcgagacaagagttttgctcgttgcccaggctggagtgcagtggtgtgatcttggctcactgcaacctctgcctcccaggttcaagcaattctcctgcctcatcctcccaagtagctgagattacaggcatgtgccaccatgcccggctaattgtgtatttttagtagagacggtgtttcaccacgttggtcaggctggcgtcgaactcctgacctcaggtgattgcccgcctcagcctcccaaagctctgggattacaagtgtgagctactgcgcccggctgcccccagtcacttctttaaagaggctatggaccaagttgtcaggcaaggaaaatgaaatcctgctttcaccttctgtgtttgggctggggtgtttgtttatagctgactcactgtttcaacaagtctgttgatcaggatttgattattgtacacacttcaatctactccatgattttgtgacttgttgctgaaacttttaaaggggaggctgcaatttttaggatatgaaaagacagccttaaagtaaaaacatatttctgactttaaccacaattatgcaatttttctgtgtgacattgaaaaaaagtgtcccagtgaagatgtacaaatttagaaaggataaaataacctcctcttttgaggttttgatctcaaaaacatcttatgacaaaaaaatagccggttaacaattcgcctatagatgaagaaacctaaggcagcagctagctggagcctcctttgcttcttcacaggccgttctgtaatctcatacgctctgctgtacagcactggctttgaagaatatttgggcagcttcaagaacccaccttctcaaggctatgcagggaccaggtcggcctcagggtcctcctcccaggaactcccgtt

SEQ ID NO: 41 - DNA, 1195 bp, Homo sapiens
gcgcttctgacaagcccgaaagtcatttccaatctcaagtggactttgttccaactattgggggcgtcgctccccctcytcatggtcgcgggcaaacttcctcctcggcgcctcttctaatggagccccacctgctcgggctgctcctcggcctcctgctcggtggcaccagggtcctcgctggctacccaatttggtggtccctggccctgggccagcagtacacatctctgggctcacagcccctgctctgcggctccatcccaggcctggtccccaagcaactgcgcttctgccgcaattacatcgagatcatgcccagcgtggccgagggcgtgaagctgggcatccaggagtgccagcaccagttccggggccgccgctggaactgcaccaccatagatgacagcctggccatctttgggcccgtcctcgacaaagccacccgcgagtcggccttcgttcacgccatcgcctcggccggcgtggccttcgccgtcacccgctcctgcgccgagggcacctccaccatttgcggctgtgactcgcatcataaggggccgcctggcgaaggctggaagtggggcggctgcagcgaggacgctgacttcggcgtgttagtgtccagggagttcgcggatgcgcgcgagaacaggccggacgcgcgctcggccatgaacaagcacaacaacgaggcgggccgcacgactatcctggaccacatgcacctcaaatgcaagtgccacgggctgtcgggcagctgtgaggtgaagacctgctggtgggcgcagcctgacttccgtgccatcggtgacttcctcaaggacaagtatgacagcgcctcggagatggtagtagagaagcaccgtgagtcccgaggctgggtggagaccctccgggccaagtactcgctcttcaagccacccacggagagggacctggtctactacgagaactcccccaacttttgtgagcccaacccagagacgggttcctttggcacaagggaccggacttgcaatgtcacctcccacggcatcgatggctgcgatctgctctgctgtggccggggccacaacacgaggacggagaagcggaaggaaaaatgccactgcatcttccactggtgctgctacgtcagctgccaggagtgtattcgcatctacgacgtgcacacctgcaagtagggcaccag

SEQ ID NO: 42 - DNA, 1068 bp, Homo sapiens
atggagccccacctgctcgggctgctcctcggcctcctgctcggtggcaccagggtcctcgctggctacccaatttggtggtccctggccctgggccagcagtacacatctctgggctcacagcccctgctctgcggctccatcccaggcctggtccccaagcaactgcgcttctgccgcaattacatcgagatcatgcccagcgtggccgagggcgtgaagctgggcatccaggagtgccagcaccagttccggggccgccgctggaactgcaccaccatagatgacagcctggccatctttgggcccgtcctcgacaaagccacccgcgagtcggccttcgttcacgccatcgcctcggccggcgtggccttcgccgtcacccgctcctgcgccgagggcacctccaccatttgcggctgtgactcgcatcataaggggccgcctggcgaaggctggaagtggggcggctgcagcgaggacgctgacttcggcgtgttagtgtccagggagttcgcggatgcgcgcgagaacaggccggacgcgcgctcggccatgaacaagcacaacaacgaggcgggccgcacgactatcctggaccacatgcacctcaaatgcaagtgccacgggctgtcgggcagctgtgaggtgaagacctgctggtgggcgcagcctgacttccgtgccatcggtgacttcctcaaggacaagtatgacagcgcctcggagatggtagtagagaagcaccgtgagtcccgaggctgggtggagaccctccgggccaagtactcgctcttcaagccacccacggagagggacctggtctactacgagaactcccccaacttttgtgagcccaacccagagacgggttcctttggcacaagggaccggacttgcaatgtcacctcccacggcatcgatggctgcgatctgctctgctgtggccggggccacaacacgaggacggagaagcggaaggaaaaatgccactgcatcttccactggtgctgctacgtcagctgccaggagtgtattcgcatctacgacgtgcacacctgcaagtag

SEQ ID NO: 43 - DNA, 42533 bp, Mus musculus
  misc_feature (1302)..(1503): "n" at positions 1302 through 1503 can be any base.
  misc_feature (3260)..(3314): "n" at positions 3260 through 3314 can be any base.
  misc_feature (5939)..(6734): "n" at positions 5939 through 6734 can be any base.
  misc_feature (27928)..(28447): "n" at positions 27928 through 28447 can be any base.
  misc_feature (31054)..(31130): "n" at positions 31054 through 31130 can be any base.
  misc_feature (39123)..(40764): "n" at positions 39123 through 40764 can be any base.
gctaacaggtaccacatgctttctagggactaagcatggtgttaggcaatttaaatatgtccatttctatgatatatattgctattagataggaaaacccaggcatggttttaagcgattggctggcatcacatggttacagagtggcaaagccagacacgagcttgcaaggtcaaactcacagctaaaagaccatttgcctgttctcttgcttcctaggccttttctccccaccccaacccccatccctatcatcatcttaggatcctgtgaaggccagaggctgcaaaccaatttgctttacattacactcccaaagcacctcactcctgggaggtcagacaccttttgcaaggcccggtgtagacgggattcaccctccctgccaagaataaagggctgggtgtgtcccatgattgcctggttctagcacaaacatagctttagacatgctgcttcactgttaatccattttctttttattattgtagcctctttcacttttctctgtggtctgcacatggatgtgagctcactcacctaggcatgggggccagaagtcaacacagctgtcttcttttattcctctcaacgttatttttaaaatatataatagttgttctttgagaatttcatgcatacataccatgagttttggtcatattggctcctcactcttcctcgcaattccttctagatccacccctcaccttcctacacccttacaccttggtgcctcctccttcttttaataactcataaagttcaatttgtgctgcccaaatacacacaatcactagaacaaggtcaacctaccagatgctccaagaaagctgagtttccttttcctctgacactttttgtcccctttcctgcaacagtcctgagtcttggagggtgtatgtgatgtaggtgccatttgtactgaacactccacagcacttgttctctgtacactgaccagttcacaagtgtttgcattaaccaccatccgctgtacaaagaaacatctctgatgagggccaagagcctcattaatctatggatacaaggatgcaaactgaaagaactgtccatttatcaaataatagtagtaggctcacttctggagcctgtgagtgcctccaccatgggctttgcccagacttacagtaccaggcaagagttttattctttggaggaagtcttaaatctattctgaaagtagttgggttaactccataatggttgtgccactaatacttaggtatattgtgccatgttgggcattactgtggctaccagaatacacagctgggtaannnnnnnnnnnnnnnnnnnnnnnnnnnnnnnnnnnnnnnnnnnnnnnnnnnnnnnnnnnnnnnnnnnnnnnnnnnnnnnnnnnnnnnnnnnnnnnnnnnnnnnnnnnnnnnnnnnnnnnnnnnnnnnnnnnnnnnnnnnnnnnnnnnnnnnnnnnnnnnnnnnnnnnnnnnnnnnnnnnnnnnnnnnnnnnnnnnnnnnnnntgagtgctcttaactgctgagccatctctctgggcccactcccacgttttggttttggttttttgagacaggtatctctttgtgttgtgctggttgtcttggaactctatagatcaggctggcctcgaactcacagcgatccaccttcctctgcatcctgagtgctggcattaaaggcatttgccaccactgcctgcaagtccttcacttttttttttatctgatggaagactaaaatttagtacctctctcttgccttttgaggggcctgggtccatgccttctggtctgaaaggtaaaagcagattggaagcttccagaagcaactgagtgcctcaggagctctgctgtcaggttgaagactctaaagcggctcggagcaaggacgtcattggcctggctttatctcaaggaggaggagacagaggaggccacaggctgagactgacggatggagcagaagtttaggatctaggagcttcctccctcagagcatctggtgatgaccagagatgtgtcagatcttctcacctggggttctactgaagtctggtgagtggaggaccagggcctggcctgctaggccagagacagcccccacaacaaagactcctgtggccagaagatcacaaaaactgcccttttccttttctgctagcctcacgaagagccagctaatgatggtttcctgcagtcttcatctaggctgaaaaggcaggggaccaggctaccggccactgcaagggactttcctcaccatcacctggccatcccctctggccccttccctggagagctctgccctcaggtaaatgttttctcaacttgtttggggaacttcgtaaaaactccccgctagccatctcataagctgtgaaggtgtgccttaatgtgcttttttccactaaaaaggtttgtttaaaaaaaaaaaaactagagcagccaggggatttttattattttttttgttcaaataactaaatagcagcccatatgaagacttcaaagttaacacatctcaagagtatccctcaaaagggagctcagaaaaaaaaagcggcagagtggggggtttaaatgtcgtgaatcaactcatggcttagacaggaaaagttggtaacctgggcggtctggtctgcctcaggaaacagccagacaaggttgggcatcagtgcatgggagcatggaaggagccttaaacttctcccctagccgggaaccagcagcctagcctctggggagccggggtcatttgcatgcgctcttaagagactcttgcttataattccctagtgtcatctttagtaactaaaggggtttctagggaatgggaggccagtgccccgggtatatgaactagcctagccacctggttcagaagcaccagtgagagccaagtgggagtgtaggaggccttggtgcctggaagttgctagataacttgaggcagatggtgagaatggatcactgtctacttgagaccttttaggcagaagagtttgaggctgtgggtgctgatgggacccagtgagtcaactcttgcatatccccagagagtcaaaagataacagaggccagttggatctcctcctcttgctgagacactaagctggcccctgaggtcacacactgtcccctactggacaatgtgtccagaacttcgcatccaacaaagggcctcatgagtgaccagcattaggggtcaagccagcatttccttccttctccctggctttgggaaatgtcccaccgccttnnnnnnnnnnnnnnnnnnnnnnnnnnnnnnnnnnnnnnnnnnnnnnnnnnnnnnngcaccttctccacagtcagcccaggcccacacccacactatgttgtcctgggtttcttatgtgactggagcctccctgaccttgtcaatcaccagctagagggagcccaaagcctgtgaactgagttgatagttggatgttgcagtggagcctgtctttatggaaacagggaagagcaaagatagggcacctgggctgacatgaatatacactgttacacttaaaaagcaaaaccaaagagaccctgtttcggatgaccttaagaaacccctgtgcagggcttggaaagagggctcagcagtaaagagcactccttgttcctggtgagctcccggcatccatatgatagcttacaactgtctgtaaatccagtttcgggggatccaatgcccttttgtgacttctgcaggcatcaggcatgcgtgtagtgcacgtacacacgtgtaggcaaaatagccgtacacatgaaaaaataaatctaaaaatatttttaaaagacagaaaccatttgcgtatggtatattctgctgatctgaaacaaggttgatcactaggcattccaatgcctgctatggaaagactgaaatacgggttgtcagtttgaccttagcccttagagtttcttccattttcttcctaccttatccattctcctgaaaatcagcaaccaaatcactactgccatggctcagaggagctggagtctgctccgaccactgagggctcaccatgggacaaatggacagacaagtagtggtccctgattgtacatcatctctgttgctcatgacaacagctgcctggggctctctgcttatcatattcagctggatccctgcacatcggcttttaatttcacaagtcttcatcatgtcctccacgtagcagaaaatgctctagaggattgtacactataactcgtttgagtcttggaatagcctagaggaatttgggactttcccttttgataattagccagatgtggtggagaggtgggcctccagtgtgggctagctccatcatagaaagtatcaccaggagggtctggcgttatggctcagctggaataaaggtgcttgccacaaaggctgaggacttcaggtgatccacgtggtagaacgagagaattaactcctcccaagctgtctcctgtgacctccacacccacagggcacacatcacctacacatacacacactcatatatacattaagacaccatgaccaaatgtaactctggggggaaagggtttgtttgtttccttttacaggttgtagttctttaaccagggaggtcagggcaggaacttaagacaggagcctggaggcaggagctgaaggagatgccatggagggggtgttgcttactggcttgctctccatggcttactcagcttgctttcttatagaaccccagggtggcaccacccacagtaatctggaccctcccacgtcaattatcagaggagaagatgtaccccaggctcgcccacaggctaatctggtgggaacttttttttttcagttgaggttccctcttcccaaattactctatctgatgtcaagctgacataaaagcagccagcacagtcagggttataaagtcagcagaggggacagccaggagaaaacacgctactgcctttgactcccctttagctgcatctgatggaaattcccccagacattaatttggggagtatggtgggcttaagaaatgtcctcaagtattgtgtgtgtgtggggggggggggaggtgtttctcactatgtagtcttgactggcctgaagctagctatgtagaccagtctggccttgaactcatgaagatctggctgcttctctacccccacctccacccccaagtactgagatgacaagcacgtgccaccacaaccagccagtcttcaaattctttaatattcctaccttaaataggtgggggtcttagcctgtggtggtatacacctttaagatcagcacttgcagctgggcggtggtggcgcacgcctttaatcccagcacttggcagaggcaggcggatttctaagttcaaggccagcctggactacaaagtgagttccaggaaagccagggctgtacagagaaaccctgtcttgggaaaaaaaaaaaaaagaccagcacttgggaggcagaggcaggtaaatctctgtgggttcaaggccaaactggtcttcatagtgagagtctgtctcaaaacaataacagagtttggagagatggctcagaagtttggttcccaacattgatgtggtggctcacagtcatctgtaacgccagtcccagagaatctggcgccctcttctggccttgtgggtattgcacacacatggaacacagacacacatgcaaacagaaacactcctacacatgaaaattaattaattaattaattaattaatttttaaaaagattgaaagcaataacaaaagaggtgaagtctctttagtctccccttaagagtgaggtgttagtgctttgcctgagagtagcaaagcagaagagaaaggggactgagacataaatggctccctctattaacagccatgtggggactcccacttagaagtgaatctcctagttcatcaggacttcagatgacaannnnnnnnnnnnnnnnnnnnnnnnnnnnnnnnnnnnnnnnnnnnnnnnnnnnnnnnnnnnnnnnnnnnnnnnnnnnnnnnnnnnnnnnnnnnnnnnnnnnnnnnnnnnnnnnnnnnnnnnnnnnnnnnnnnnnnnnnnnnnnnnnnnnnnnnnnnnnnnnnnnnnnnnnnnnnnnnnnnnnnnnnnnnnnnnnnnnnnnnnnnnnnnnnnnnnnnnnnnnnnnnnnnnnnnnnnnnnnnnnnnnnnnnnnnnnnnnnnnnnnnnnnnnnnnnnnnnnnnnnnnnnnnnnnnnnnnnnnnnnnnnnnnnnnnnnnnnnnnnnnnnnnnnnnnnnnnnnnnnnnnnnnnnnnnnnnnnnnnnnnnnnnnnnnnnnnnnnnnnnnnnnnnnnnnnnnnnnnnnnnnnnnnnnnnnnnnnnnnnnnnnnnnnnnnnnnnnnnnnnnnnnnnnnnnnnnnnnnnnnnnnnnnnnnnnnnnnnnnnnnnnnnnnnnnnnnnnnnnnnnnnnnnnnnnnnnnnnnnnnnnnnnnnnnnnnnnnnnnnnnnnnnnnnnnnnnnnnnnnnnnnnnnnnnnnnnnnnnnnnnnnnnnnnnnnnnnnnnnnnnnnnnnnnnnnnnnnnnnnnnnnnnnnnnnnnnnnnnnnnnnnnnnnnnnnnnnnnnnnnnnnnnnnnnnnnnnnnnnnnnnnnnnnnnnnnnnnnnnnnnnnnnnnnnnnnnnnnnnnnnnnnnnnnnnnnnnnnnnnnnnnnnnnnnnnnnnnnnnnnnnnnnnnnnnnnnnnnnnnnnnnnnnnnnnnnnnnccctgatatttattatttttaaacataattattttaaagtaatttgttaatattccattgaatgagacccctccttccatacagaagacatcatttgtatttctcttctcactggttcctagtacttaaacactgtactgactcgacatcattgagtcaaagccaccactgactgctgagtgatagacttttcagagctaagaactttgtgcacattataactcataactactttggttgttggactatgcttttctttctatgaaagcagtgtctctgtcttgcttatacttatgattcttgattcttgttacaacacataataggtgggaaatctgtcgggtgaaactaaatgcaatataaataagatcattataatccttaaggggtttttaatatacttaggtttagagaagatgcaagtcgtaacttctagttgtatgggagcttagtcggaccttattcaaacagccctttattgggtgcctactaggtaccggacatggaactgtaaacatgagacagtcttcagcttgaacaggggccacatctcaccaccttcatcgccacctctgtgattcatgctaccagtatcttttcttttgtttaggacaatgagattacaatgttaaacccaacattgtaatcctaactggtcttccctcattcacttttctccccacaggaaaatctcaactgtgtctaaagggatcccaggatactccagtcagagcatgtagttcccctgctctcacactaccaacgtctgcccacctgggggaggcagcaggcttgaccttacaagtcttcaactgggtctgagtcaagaggtggactgtatcttcagcccactgaacattgagcgactttgtgactttctttggtcaataggatgtggtagatgggactctgagctagacctgatcatggatgttggcaggttctgagttctgcctttagaatccggcacctgccaagggaacaacaggcaggatggctgggagggtggggtggggtgggccagggagaacagaccagtcagttaccaaccaactcagcagctgagaggtctggatgagatcagagctactgtggccttctggaatcttctgaatgacctacaaactcagccaaaagcatgcctgtttaaagctctcgtgaagtccttggtatgttacacagtggaaacttactgataaactgtctcgttcaggggaaaaagtcaagtgttttgcctggcacatggtgggtgctcaggggacgcttgattaaataagaaattcccaaatgcagtttgccttccagtgaagaaaataagttctaaaacaatcagcggctacgataagtgctctgaaacaaacaggcagtcgcagtggctagatctgaggatctagggaacggggcacgggcctgtggttggttctctggttactttagaatgaggcaaaactcctcccaattgactccaagagccttgagagacgtcccggctgatccacgtaccgaacttatcccctaccagtcccctgccactctcaggacctctgatccggagacactgggctctctggtgttccacctcaggtgtgtgcctggacctttcttcacttagcctctctgctccccctcaggttcctgctcacgtgtgaccccttcaccaagcccttcctggccagcttacaaaagtggccactcttcgaattctcctaccctgctctatttttatctgtgacacttgacactccctgatgtattatgtcagctcagttgttttacctgtctgctctcaccactaaatacaaattctacaaggattgacttttattattattattattattattgttattgttattattgttattattattattttgataggtttgtccttagaacaatattgtcgtcaggcagaattgtaatcagtggatacaaaaatgctttaggagccataacatattgtcagccctcagattaatcgaggtgagcatttgagccacactgggaatagagtaagagcttttattttaatatgtgtgcgtgtcttgcctgcacatatgtatgtgccccgtgtccatttcctggtacccgaggagtcaggaagaggacccctggaactggagtaacagatgattgggccactgtctggatgttaggactagatcccaagtcctctggacgagcagccagtgttcctaactgctgagcatctttccagtccccaaactttaaaaaaaaatagccaaaacactgggatgagaatgggactgttcactaaagcgacaagcgtgttcgtgtcatgggacacatgccaaacaccgccactccacagcatgctttacagagtgggggacattcctattcaaattgtcatccctcattgcagtagccctgaaaggtagtaggtggggcaggttttaggtgtgtgtgtgtggtgggaggctggggggggggggagtaagggaagggaagtcactggattctcatcatatcgatctgactccaagtccagagcctctgtccctcattttgacgttctctccttgttgggttatgacgtcactgacttctgaagactcaaggtcaaccttgaactcctgaaggagcccctccacagaaggtaggtatcctttctctagggagaatgaaagtgtcttgctaagaggacaggggatagataataaacttctttagcatcgattccagagactccccgagactctcagctagccccaacgtcttgcttggtcatctgtaaaaggcagtgccctcctttctttttgtccccagcccaccgaactgtcctataggtgaaggaggaaggccggtcataaaacaggatgggcagttgctttcgggtgaaacccagaaagggtcctcaggcttgtcgctgactgtatttagatttaaaaatcaaggcctgtgacctggaggctctttcctgctgctctctgccatgttgacagcagagaacttgctaattctggccggggattttccctgtgtggctgtttttcttctttatcttcatcaattgaagagcgctcgctctgcctttcaaactgcctgccggaagatactgggggtttgtgtatttttttttctttcacctaattctgtggtcttttcccagatgtgtattttctctctaccttctttctaacttgttgacgtttccgcccatgtgacttccagcttgaattaccagaaaccacaagagagggcctgtgcgcaagccccaaagcagcgagatgtccctgtggggagcagtccctctgcacccgagagagaggaggacgcaggggtctgtcagaggttgctgttgggcaagcaggggaggtacctgtggaaggtggtgtgctggtggccccctagcagtcaagaaggggagccagctagtgagaagatcgcccagaggcatctgggacggtgtgggagagcccggaagattagaaccatgcctcacagctccgacagcagtgactccagcttcagccgctctcctccccctggcaaacaggtacccccttcgtccccctcccccacgccccgcatgccttgccttctgattttcctggggtggtagaagaggggtaggctcccttgtcctgcccagggagctctgtctggggaaggaagtagctcgtggcaggaactctctagcagactctggaccgtgtggtgtttgctatacagaggtccaagggctgaagcttcgcatcccgccacaaaagcctctctttccaagaggtacccctcgtctctgccacttaggttcccaccgtgaaactttctaggaagctgggggcagggtgaatatcacagagcttagaagtatggtcaaccataagcagaggaatgttccagtagatcgctgcttcgggctccacccaaatcctagagttgtagctttccaggaaaaaaccaagcaagtggcaagacagaaccgaggtcagggaagagaaatatagcaaatcaaagcaaggtagacaggaggagaagagtggcaagatctgcctgcggattgcctcggtaactccagcagtccgtgggaagggaggctaaagctacaacctgtatctttcccccccaccccccatgtggcttccagatagaagaaagaaggccatggtccaggaggcgtgtcagagactttcactagtagctaatatcatccctgaaaaaccagggatggagggaaagattctgagactcttagactcttgactgataccaagccgaaatgtctcagactgaaagatgcctccgatgggatgcctttctcaccttgtggtttctgggtctctctaccacgttcctgatgccccttgttctagacatttctcctcctcatccaacatagacccacggattaaacttttttacatctcatcttaaaaactatattctttccttagcacacatattgggaggggctcagaggtagagtgtttggctcacacacatccagggggctgcaaaacgctacaaacaaaataaacgtaaactacctgaccaccggctcccacatctgtcacaagccctcaccaaaagccatactggtgaagacctcaagagggagatagtccctcgctcacgatggtatcagagcaactcagactgcctggaagatggtaccccagtctcttcttaagaaggaaattactcacagcttccatggcaacctagtcccttagcacattaaaggaagaatatatccttgccctctctaacccaatgtccgtttgctagaatgacctggaaagtttgagtaaagagggaagggaatcagaacctgacccaagggtctttgcccctcaggccagtggaggtaggtgacagggtgggggttgcagaagggcttctcttccctgatcttctataggagatacttagaaagcactcaaagagcactgtgtcctccaaagcacccgtcagtggctcactaaagcaggcgacctgcacttcataaaatgatttggtggtggtggtggtggggttacctcatctgtagcaggcatcatgttcaggactaggaaggtctcaagatgtctgcacaatgatggaccgaataaaacagatctgggcggcgccctctgcctaggggtgcagcacaatgaaattaatagtcaagggggaattctcagaaaggattgagcatcagtgccagaaagatgtcatacccctggatgtccatgagctcagggatcagggtggagagcctcagcttcgtactgtgtaaaatagaaaagacggtgcctgctcagaaagctggggagttgaagcatagcgtctccgaacgcgcttgtacagaagttggcacatggtaaatgctcagcggagttttcaaagacaacagcaaaaggagcatcaagaaggtttagcatgtgcgcacacatgcacatatatacatgcacacacactcacacgcacacatacctcacatgcatacatatgtatacacacatgtacacacacacacacacacacagagtgaagctagaacagctctggagagagcagaagtgatggcatcttaactggaatttcccaaagtagccctcctgaggcttcaatttctcttcacttttgagtagcttttgatcataagaagaccataggagacccaagggtgggtagcagggaatgctgaagaaaatgtctttgggtacaggccttttgtaaataaggggaatggacaatacagaaagaactgaggaccgggaaggaaggaaggaaaggagggaggaaaccaatgtcctattttgactaagaggaacgatcagacctaccgttgatatctctgcttcctaggactcatctgatgatgtgaggaaagttcagaggagagagaagaatcgcatcgctgcccagaagagccgacagagacagacacagaaagccgacacccttcacctggtgagtacccacacttcctaccatgctcctgcccttaggctctgcgccccacaccagtgaggctgtggggcccagctctgatgattctgctgtggtagagctaagtactgggggagagtagtagagggcaagagctgcaggggtcaggttgtggaaagggcttcgctctcccatgcatgtatgaaaacatttagtagcagagaacagcactggacactgaacctttctggcccaggagagtgcaagggtagatgtgtgggatgttgacagcctcaaggcttcatgggaggcagagccacctgtgtggaaagggacagcagagagggtgtcgtccttcctgagccactgtgagcagaacactgatgctgagaggaagttaggtgttaagtgcttcagggaagccattctttcagagctgcacatctcatccctctggaaggcaatggtctgccacccaagcacacttgcctttgggagaaggaggtcgatgatgctgcccttattttttttccctgagcatggagaaagttctgtgttgagatttacattgttaatggtctctctagggtctgctaaagacaaaattttaaagcacttacttgggacaatcaccatcctggtctagcagggaggggatgaactgcagcctcacttgggagacccagggcctggaccagcgaccccgagtcctgactgggcgcagtgttcccacccttcatacctttcctctttacagtctgctcctttcactgtgttcttgctcaactgttccatcttcatcgcatccttcttcctgctcttcctccttcctcctgaaacatttccaaactgctaatattctagaaatttcctaaaagtgcaagaggtgccaaacccagataagctgataatgatctgatgtttagcatggctaagggctgctttaattttatcagggataaattatcgggggctggggaaatggctcagggggtaaaatgcttgccattctagcatcagggtcagaatccccagaacccgcatgacagtcaaatgggcaagaggcagaagcagcaggtggacatctatgaaattgaagccagcatagtctacacagtgagctccaggatagccaggtctacatagagagcccctgtgtcaaaagagaaaaaagaaaaaaaagaaagaaaaaaaagctgaaaagcttaatggatgtggcagcctgacagtgtaatcccagctcatgggaggtggagatggggaatcttagagtacgttggctagccagactagtcaaaacagtaagctttaggttcagcaaaagactctgcctcgattctcaatacggaagttggaaagtgatgggagaagatactgacctcaaccctgggcctcacacacgcatgtgcatctatgtacacgcgtgcccacatacaagaaaaatacatggaaacaccacacgcacatacacatgcaacaaaagaataagtaacatacagttttagaagacaaaggggaggatatcgccacttctttcagcctaaggacagagaacggtctgccctagtcgctctgcctgtgcttctgctctgtttgataggttcttaatatagtctccagtacgtgctaacatcattttcaattggcaaatatgtgtcagactaacaagagaaagaataaacagcactcagcacaaacagaccaacagtctgagtgttcagtgtctgtcccggtactcaaacccttcaagatttcctgggggcttaaaaatctcacactatctgaaactgactttttctatctgagtctggttcttagttaatattccatagagcaagaaagccacacttacgataaactccgttttgtttgtgcaagtagacaatgtcctagatgggcaaactcctgtaagctttgtaagtttgtaatattaaaagaaggaagctgagttcagcctctctctggcagggaggccagacttgaaccaccgctctgccgactgctgtctgtgtgtctggacccacaagcattcttcatggtccttagccttggggcccttatctatagaatgggaaatgacaggaactgcttatagagacagtgcaggagaaaagctcagtatggtgcctggcatacagtaaatactcagaagattctgtgcaattaaagttatagtaatagtgtaagaggcgtgaaaactgagactgagcaggcatacatatgtacattgcataattttatataaaaatgtacgtgtatttcccagtatgtatatatgcacatattacatgcatgtattgtgtgccgtgtgtattgtgtgtgtatctaccatgtgtgtgtgtgtgtgtgtgtatcgtatgtatgtgagtatgggtgtgagtgtgtgtgagagatgcatgcatatgtgtgtgtgtgtatactttttctccacatcatctcagtgctgagagacttcttaacagctgtaaagctcatgagactcccttgccacactcactcccggcagaaggtccccagggcacgcccagtcacctctaatagcagagtgctgcctccctcttgacacaggagaagggcctcctgtctctagctgcaggccaccttcctgtaaactcagccccctggtctctgttgcctaacttcttctgtgagagcatgagaaacttacaatgaagcattttgaatacctgtcttgtattcatgcatggcgcgctgattgttttttaagtgacagaggtggggaggagcctcctgcgacaactgtgttacaatgtccccagcattgattaactgcacataattcatttgtgattctgttccgattatgagatatacgtgatggtttcccagacacagatgtaaacataagataattaggatggcatatcaacctagtcagagaggtcgaattatctaataaatagagttgggacacctggcaagtcacttgaagagacaaaaggccaggtctctcattccttatgcaatgcacagacagtttaaatatttttaaaggaaactaaagaagtcttgggggaaaatatgtaatttggaaatgtaccttggcatgaaaatttttcaaataagatagatagaaaataataaaagaaaattgatatacaaatgtgatttatacatgcatcaaaaaataaaaaaatttggctgggcatcctaattgggctaggccttcaatcctagcacttgggagacagaggcaggtggatctctgagctcaagaccagcttcatctacatagtgagacgcccatcttgaaaaaaggatgaagtttaccccccctctttcttccttttctctctctctctctctctctctctctctctctctctctctctctctctctctccttccttccttccttccttccttccttccttcctttctttctttctttctttctttcttttttttccttctttctttcttttttccaagacagggtttctctgtgtagccctgcctgtcctggaactcactctgtagaccaggctggcctcaaactcagaaatctgcctgcctctgcctcccaagtgctgagatcaaaggcatatgccaccactgcccggctgaagtttttctttcattcttcaaaatattatatacaaaatcaaaggcaaatggaaagccaggagggaatcatctagaaaattcatgagccagaaaggcaggtttactacatatgtgggaactctatggcgagggaaatgattgatctttattaaaaaaaaaaaaaaaaaaaaaaaagactataaagtgagggaaagggagaaacagaatgtacctacacatgtaaggatgcgccaggcctccttgggaaaatgccaatgagggtgaatgtaagacttccttgccaggctgacagaggtgaaagatggagctgacccaggaaatggccaagggagacggagagtgagcatcgcattcccttagcagggcaagttgctataaccccctaagacggcagcttgagcaggctcactcaggtggcaggggcacctcccctgtctcccagcagggtgctgtccagaatccgtccacaccacaagcacagcacagaggttgtagctctctgagctgagtgtgagtcattgttgcgatgtgctgctcttggtgtctcttggtttttgtttagtggcactggggattgaacccagggacttgtacaccactgaatgactggaaactagttacatattcattaggagaatgggggttgaatgaacactattggtccattctgagtgtgctgttatgggactgttaagtgagttgcttctgagtgtggtaaaactatcgttttcttttctaaaacagtttttctaagttatggaaggtggggtatgtgtacatgagtgcaggtgcccataaaagacagaagggggtattggtcccatggccacaggtactagaaactgaactcgggtcctctgcaagagcagtagatgcccttaatcactgagccatctgtccaattcctctttaaagctttctatgttgcagttatttattgtttgtttgtttattgtgggggagtgcatgcatgtgtggatgagtcggttctctccctccgctgtgttgggtccgggcatcgaactgaagtcataagacttggcagcaagcagccgggcgtggtggagcacgcctttaatcccagcactcaggaggcagaggcaggcagatttctgagttcaaggccagcctggtctacagagttccaggacagccagggctatacagagaaaccctgtcttgaaaaaccaaaaaaaaaaaaaaaaaaaaaaaaaaaaaaagacttggcagcaagcactctcaccccctgagccctcttaccggtccctggttcccagactcttaaggaagaaaagtgcaaatgtagcatctagcttgcgccaagccacactttttaatctgtctgagcataagtatacaggcaagtttcaaatggatcacccgaacttattaatatcattttcaaaaggtcacactgaagttaaaagacaggaaaagtgtcctttgcattttcaatccttttttatgtcagttaggagtagctaagatttgagtgactctaagctccgtggtactagatggaacactttaaagaatggcaagtcgttttcctgtggccagccagccagttgagagtgggagccttctggaatcttctatcatagggggattttgagtcaatgtcctgggtcagggttggggtgggggtgggggtgggggagaactgagatcagtttaaaagcattgctctggagaggggctccaagcagaggaggtgggggttggacagcagagtctcccagagtgtgctgttggcaagtggcgcctggtctccaggttgcttggccatccgtgctggatctggaaactggagtacgaacagggtggctcctttctgtgaagatgaggcaggatatgactgctgtgggctcctgaagtaatctcaccacagttcaggacaggcaatgtctgtgatttgtaaaatcacataaaacagaaaaatcatgtagactgagctgatgctgtgaaaaatgaggaccattggaggaaattaaataattgagaaattcccaaagatgttagctcccagggacactgggagcaagttttcagcaaggccattgctcttggcttgctgaggtggcggggaaacgaggctgtgaggttcctccaacatttctcattctctgtctctaggagaccacatcctgaggtttattaacataacaaattcatagatctgtaaaacaataaaacatgaagggacattctggctagtttcaccttttaaatgcttaatctagagccagtgaatcagccgcctccctggcatctctgcctctctgaatttctatttaaaatatggtcattagctgggcatggtggcgcatgcctttaattccagcactcgggaggcagaggcaggcggatttctgagttcgaggccagcctggtctacaaagtgagttccaggacagccagggctatacagagaaaccctgtctccaaacacacacacacacacacacacacacacacacacacacacacaaaggtcattgaacacctggccatggtcacgctaagtgcgttaagtgtcctaccagtggggttgcacttgatctgaaaaaacaaattctttgcattaatcaatctgctgaaggttggacagcttgaacttcagagccctcctttgtaaacataaacatctatctgtatccttgcatctcctgctaaggtcttgtttgtcttgtttctatttaaacaatacactctgaaattcttatttttccctgatcatcttaggcttggtcaagaaagtaaagaaaggtctatctgttgctgtctgtctatctgtctgtctaccctcccccctttctccccctctctctctatctctctatctggctgtatgtgtgtgggtatatatagatctttatataaatatgtgatacatatgtatgtataatatttatacactagtttttagaagattgttccattttaacagtgtacacaagaataacctttggacacagtccttctcactataacattgtaaggcaaagtccatagatgaggatgctggaaacatggatatctgaacagcaaacactttatgggtgtcataaaattaggcagatggttaacaggatatttaacagactgtgatccacttacgcaatagaaattgaggctgacactagaagtggccatggagatctttgtgtatagacttagaaagatgtctgcgaggctgaattgagctaatcaagccaggggagtgtgcagagcaccatctgctaatgtgaagcttgcaaggtttggggatggaaacatagtctccaaattaccaatggtggttacttctgagtgcctgggttggggtagcttgccttcctcctggtgctctttgcagtgttattgtgacttaaatgtgctgtttaaacaatcagaaatagtcccagagtctttacaaatcagctattttagttggggaagaacacaccaaggcaatttaccacctcaactgcttatccaaggacgatgggctgctccgttagggtgggagggccccagacttgaggaatgtgtggctgaactggattgttagtaccagctcacaacccaacagctaccccactcaacaggtgtcaggaggctctcctcagcggcaccaagtgtggcttctgcttcccacagcagtggactggtccacaggataaaggttcctttcggcttgtttttccatagcctcaccatggggccccatagtagctttcagaggaaatgccactaagtgtggccacactgtcttgttcataggatcaaagtgttaaaaacgaaaacttggggtttttaggccaacctgtcatgttaccaatgaggaaatcagtgtctttctcggggacacaaaaggaccccaggttcttgcttccttaccagcctgtatctgttttgtgatattcttagttttgtttttgtttgttttgtttgttgttcctatctatcattttgcaaagggttagccaagaagtagactgatggtcaggatgcttacacaagactctcattacttccaaaacatttcaccaacagggagagaccataaaaggagttacagtggataaagcctagagtttaaagaattatttatttatatgtgcattgattggtgttctgcctgcgtgcttgttacaagggtggcagatcttctggacttggagttacagaccattgtgagctaccacgtgggtgctgagaattgacctcaggtcctctataagagcagccattgctcttaactgtctcaccagcctaggcctagaatttaaaggccccgttaattagaagatgtaaaggcaggaccccaaaaggatgatggtatttttgaagaatatattgtcattaaattaaatacatgatgatttaatatgtatactaagaaggaaaaacatcctttgagagaaaaacatcaagacattcatcactaagtgggcagaaactacacagaaagcttacacacatttttcctacccaaatgaaaataacctaattttcaattctgatgacaaaaacagtacacattgagacagggtttctcaacctcagggtgattgacagtctgagtcttatacatttttctttttccttagtattaaggtattaaggaccttatgcagctgggcagtggtggcgcacgcctttaatcccagcactcaggaagcagaggcaggtggatttctgagttcgaggccagcctggtctacagagtgagttccaggacaaccagggctacatagagaaaccctgtcttgagaaactaaaaaaaaaaaaaaaagaccttatacatgccaggctaacactctaccgctgaactataactcatcttttccccactctacatttaaaattttgagacaaggtatcacaaagctacccaggctggccttgaactcactgtttagcccaggcagacattgaactttcaatactgctgcctcggcttccaaagcagcttgggattgtgggcctacacccccaggactcctaataattctgataattactatatatggctgtcttgtgcaccgcaaaatgtaaactctacccagtagatgccactagattcgtctccctccagttatgacatctggaacttgccagctaccccctgaatagaatagttacccccatttggttttgatgtattaggttctgttttaaaaaggtgttttgttttgttttgttttttgcttcattagaagttgacagcttgcaccagtaagcaggcagccggaaaggatggcggacggcctggaaccctttggagttccgagacttgccgccgggccgggccgaggcgggagggacccttccaagttgactttgcgggtggagggaagtcctggagttagcaggactgtgtgcttgcgactgtgggcgtggagagagcgagtagcggctggagcagccgtgctcctcccgaaccgaccgcggccacgctgccgggacttcccggacagcgtttgcgccgcccaccccgtggccacgggcccaggatcacatggctagacccggagcggccggggtgggcgtcctccactctctccggcctgcgttttgcgagtgtagcggtggaggctgaatcggatcccaccagaaaccccaacaagtgggcagttgggactagggcgttcactagggcgttaagaaatcttcacaaaactagttggcacaatttcttccattagaaagcatggcatccagtgcctctctgtgactgctctgggtggcttcaggtgcagcaacgttacatctcaggagctgtagtcatcttgggcaggcactcactgttggttataccgtctcacaacacagtatggatgcatcaaggtggcatttctagtgctatttgcaacagggatattttgacagccatcagaatgtcccatacccggcaaccatctcaagtaaattcctgatcatgcacttgatgaggtggccatgaaacacagtacttgtgacactgtagccattacaaagttataaaaaaggcaaaagacaaattatcttttcactagggttgagcttctacagaaagaagtatacactttgtttgaaaaaaaccaggatgctagtaagtagcgatgcgagcaggtgttaggagctaggattatgggtgccttacatcttaaaagctctcgaaggctaggcaaggtggtacaagctttaatcccagcactcaggaggcggaggcagatggttctgatttcgaggccagcctggtctatatagcaagttccaggccatcaggggttcatagtgagaccctatctcaaattaattaatctttaatatagttatactgtgtgtatgtatatatatgtatatacacatatatacacatgagtgtaagtgtgtgtgtgtgtgtgtgtgtgtgtgtgtgtgtgtgtgtgtgtgtgtaaagaagatggccaaagttgagaactctgaaggaaactgaaatatcgctgttaggttttggcaggaggttataatttatcttctcagctggagctctttagggaatgaaaaaggagtcctagcaaatatcataccaggacagcagagatgaacttgagccatccccagaaagcttgggagaaccaaggacagtgacctggatcactcactagtgcaaaggaaaagatagagttcaaaaccaagcagattaggaccaaaaggccattctgtgtgcccagcatggaagcctaagccattggtctcatgggctttacattcaactgtaggtctggaaaccaattcagaatctcactagctacacatcatgaaaaccgctttgacactgaggatcaactgcaaaccacagaggaggctgggaagacctggggaaacggggcctgtggagagacttggggccaaacacaacatgaagcatcagaaacggaatgtgaagccagagtcggggtgacaaggataaaccagatatgtaatacaaggatggaagataggaaattggagcacacaaagaccattgtgatccaggctggggattgctctcaactggagacttttttaggtagaccagcttttattaattcttagacagtttcatacatataagcagtacatattgatcactctctgtccccactctcaccgatacattcccttctccctgatctacatcctctgatactgatacctgtgtgtgtgtgtatgtatgtatgtgtatatgtgtatgtatatgtgtatatgtatatgtgtgtatatgtgtatgtgtgtgaatgtgtctatgtgtattatgtgtgtgtggtgtgtgtctgtgtgtgttttaatccactgagttcaattaacactgcccattgtattgttcactgatcatgtcaagtaacgtcagctgcagtgagtttattggccacattacactcaaacgagagctttctctacattaactgttgaccatagcagacagctgcttctttctggccaaggctgatgaaagcactaagtctgtggtataaatatgaacaagacagtttgacagcttgccattaatcagaacaacaggatcaggttacgtcctctaccctaccaccctaccatcccatgctgctctcaccccttcccacccgggcctagaccccctaagcagcatgaggcctaagtctcttaagccttgaattagagagaaagtaagaatgttcatctctcctggggagaaaagcagagctccagctggggtgttgatttgtctgctcagctcatgcaaaagttggtcttggcacacaaaccaacctgctgtcttgtcacttgtgagtcttggcacacaaaccaacctgctgtcttgtcacttgtgagaaagaactatgcccttctgtctgtgggttcatgagaactctatggtcaacgcttcagcctccttgggttggtctgatccgggaaagtcaaatacaaaggagggaaattacattcaaagtcaagtggtgctactctctatatggctgggccttttgaaaaaggaacctcttagattcttttgtaactgttataaagcagctggaatgttgggttaaacactccccgctagcctcgaagatgtcataggtctactgagtagacaccgtcaggagcatttgtcacattccaagctagcaagcaagtaacacgatttggctgagcattcacattgtgctgtctctgtcgcaacgctgaggaccaacgcatggagaccatagcagcttccttctctgccctggaggagctcaccaatccaaagggacctagtgtgagtgaggtttaactggtgagttcacacagatccccacctctagccttgccatcccaagaagcaggggtgctgggaccggggcaatgctgatggagtaaatgcagttgtagcagagcctgctgacataagtttgaccccttgaactcacagaactgactctgggaaggtaacctttgacctccaaaggcctgccactcattcgagtctgccctcacacacatacatcatacacacatgtaataacaattaataagtttagcaccttaagagctgttctgggccaggcattggtggcgcccgcctttaatcccagcactcgggaagcagaggcagtcagatttctgagtttgaggccagcctggtctacagagtgagttccaggatagccaggactacacagagaaaccctgtctcggaaaaaaaaaaaaaacaaaaaaacaaaaaaaagagctgttctgaactcttgttttcaccaataatctattgtctttaaatgtcaaagtattctagaaaatttttaacttagaaatgttcattcaactcctaagactctgttttatgctacctatgaaaatatattcttaacttagctcggtggtggtgcacacctttaatcccagcattcagagtgagttccgggacagccaagactatagagagaaaaacaaaacaaagaaagattaaaaaaagagagaaatatgtctaatgagataaaacatgaaatacatttaatagtgattagttctgctattatactctttttaagtatctgcaatgaatatgattctcaatctggctaagcactgggctcaccagggaagtatttttaaaatcttgatgcctacaccccatttgtagcaatgaaattggggcctctaagagacagagggtggagtctagacaatgtggagtctgcatgtgtgcttggtaatcacacagcttgaaaagtgctttgtcaaaaaaaaaaaaagtgaaataatgcaaggctgaaagtgacctcgggacagggatggggcagggatgcagggagaccttcctaagcccctaacctcggaaatgatatgtgaatcaaagcagaggctgagacggcctggggaaagtgaccaatggcagagactctgggccacaggcagaagtcctcagggacatgcagcccaatgtggaaggagtccataagctatgcatgtcctcggtcccagcacctcgtggctgacacacactccaagcctctgctctctgtttttccacattgggcttcctgtggtaccctgggagcaagccatccatcgggatttctgtcagctacaagtcataaataggccatggaggggcggcagcagcaagcctcgctttctttctctcacataccaagctcaggaatggaaagagcaggtctctgtcagcgtcatctgcttggctctcctctcaaggctgcaagatggctgccggccctccaggcctcagtctgtgttggcggggggattgatttgtccttgcccagcaactctaccatgaagagaaaagagaacctctgtccctgtgcctctacctacatattacagtcataattatgtcacacgcacacacacacacacacagccccaggtgcaaggaagctgggtatttgtgtctctctagctgaaaacagtggggtatttggggaggacgctaagtgagccaacctctagtaggcccatggaaaaaatgaggcccaggtaacatccttccaaccctgtgactatgacaggaccacgagagcatgattggtgtctgaccagctattggtggccaggagctgaatgaagccaactccagaacccaatgtgtggtgactcctccccaccatgaaagtcaatggtggcagatggaggaccggtcctctctctcctggggagcaagcccacctctccattggaaaccttcatcaagaactgtgggctccacttgccatgtgtacttgatgtctggcacatggtggcaccaactccaaatgccatgtgaattggaaggttaccatgctaacgatagtgtgcattttcctttgggcagaaaaaaactacagagggtatttcatcctctggaaatggctgttagaaaatgcaggaaggtggggctggaactatagcttggcacaggctgctctttcagatggactgcagcacccacacaatggtgtgcaaccatctgtaactccagttccaggggatccgacgccttcttctggcctctacgagcaccaggcacatctgtggtgtactggcatgcagatacgcacataaaattttttcaaagaaaatgcaggaaagtcaaagcactggagagctggccatgaacagagcagaacagagctgtaaggcatatgcctggggagtccctgctgagccccccgcatgagctcaggctggaccccagccaggcagtgccagctgctcccagtctctctccagctcagctgcctggggctgagggactagcctggggattcccctgtcactcaggagctctgagtgacctcctctgcagcccctccaattggggatttcccagaatgttcccacacctcaacgcctcctccttagccacccccagctcttgatagatagaagtggcatcaggtgaccctacaggtgagggaggatcagctcgagggagggagggaaactgggaggttggccagtgaactgagcctgagacaatctaagctcacaggctcccaaggcaggaggcaaaggacgggtgtttgtgctgcagcctacaagctgtgtggtctcctgacaggttgcttaacttttctgtgcctcagtttctcctcttttgtaaaagggtgtgttatgcagtggtgttaccaagattaaatatgatgatagctataaaatatacaaaagggtgggtgtcatgaggcatattcctttaaccccagcactcaggaagcagaggcaggctgatttctgtgagcttatgaccagccaggtcttcacagtcagttccagtccagctaggctccaataagactctcaaaaaaataaaatatgtgtgtaccatatatgcacatctatttaaattgtggtgccagacacacccataggcacatgcacaaaaatatcaaaaggcttggggaggagattacaggcgctagtctactaatacatctaggtagccaatttggaatctgaaatattggaaaattcaaggggaaactggagacacccccattcctgtagctgtcgacattagctgcccaacgggcaccccgtgtagcctataaccaccaaatggcaaggttaacccagatctagttagttagaacctgtcaccaacaatactagtcctccctggaggacccaatgtcaggaatagcaggctccagctgaggatctttttggactagtcatcttgccttcaggcgaagcagctggcatccaataggaaaagagagtcctcctggggccacgcagccaagaccaccaatgattcnnnnnnnnnnnnnnnnnnnnnnnnnnnnnnnnnnnnnnnnnnnnnnnnnnnnnnnnnnnnnnnnnnnnnnnnnnnnnnnnnnnnnnnnnnnnnnnnnnnnnnnnnnnnnnnnnnnnnnnnnnnnnnnnnnnnnnnnnnnnnnnnnnnnnnnnnnnnnnnnnnnnnnnnnnnnnnnnnnnnnnnnnnnnnnnnnnnnnnnnnnnnnnnnnnnnnnnnnnnnnnnnnnnnnnnnnnnnnnnnnnnnnnnnnnnnnnnnnnnnnnnnnnnnnnnnnnnnnnnnnnnnnnnnnnnnnnnnnnnnnnnnnnnnnnnnnnnnnnnnnnnnnnnnnnnnnnnnnnnnnnnnnnnnnnnnnnnnnnnnnnnnnnnnnnnnnnnnnnnnnnnnnnnnnnnnnnnnnnnnnnnnnnnnnnnnnnnnnnnnnnnnnnnnnnnnnnnnnnnnnnnnnnnnnnnnnnnnnnnnnnnnnnnnnnnnnnnnnnnnnnnnnnnnnnnnnnnnnnnnnnnnnnnnnnnnnnnnnnnncagtatggttttgctccaggtctcaattggtttccttggtaggatggctatactgactgcagcagccgttgtgagaaccctgatgggcctaaccacattctgaaaggtgaagagagcaggctaaggtggagcagggagggaggcaggctcgcttgatctccacactgcctagtagaaggacatttccttcacacacacaccctcacccctctccctcactgagttccgtcccttctcacacccggaagttgggtaggggtatagtcattgtctttgtggataaacagctgaccccaactgtccctttagctagatgagtcctctccagaggccctgctgccctctacagcttagagggatggggcccaaagcagccacttcctcctacaagtcattctttctctagggagtggccagtgtctgcaaggctccgagcttacagacattcctcttgcaagcagccgtctggctttaagaggtaaagacacactttgcctcatggtgagaggcagcaggcagtggttagtcaggtctaccccagcgtgggctttggcatctgtaggcccaggaggtgacaggagaaggccagcgggagctccgcagagcgcctgctagtgacttgccctgcagtcacttcccgaaaactaggccggcctctaggcggggagacgatcggagcccgcccacccagtccgtccctccttgctgccttggggtttgcccaggctcttcggagcacggaacttacagtaaatggtgtaaccagtggaaactctcagagggggcgaggaaagggccaggactcagggccccagttcccgtcttagcataccgctccaccaggttcatttcgcccacctttcagtaacggggcgctgccttcctggtaaaaggctgacctccctctgggatgtgccagaaaacaaaaaccagcgaaatgcccagctggcctcagcctgcaggaacagcagcagccagggattgagcatccagttgtcggcttccctcagcccgcttgagatgggggtttcctttgcaccagactaggggccctggttagctcagagagcattcaaagtgtcgctgaggctcagcgccttcccatatgaccttcaaaagaaatggaagctgtcttgatgagcaatgtcagggtcctctgctcctccacaacttaaaagagaaaccccgactgtactgagtttccgtgattggcagtatagctgataaatcccatctctccttagcctgcagctcactcctgctggatcatttagggttaattttaaatgtcaagttatcgtacatctgctaaccactatacttttgagtcaacattctcatgccaacaattgatgttatcagccagtcagtccacaaacacttaagttcacttggagcttaaacgggcatttaatacatgcttaaataattaaagcaggctttaattatttgtatcatatttaatagggtttttaaacttgcccgggcgttaaaacgacctaagacacctgttaaaagctcagatttccagaactgaggtgttggctccgttggtaaagtgctaacggaggacctgaattgtgttctcaagcacccatataaaaagtggggcggggggagcacgtggctggaatgtgggcgatggcgagattggaggcagatccctgaaagcccgagggccactggcagttccaggtaatgagacatcctctctcaaacaaaatgtggacggtgcccgtgggagttcttctgacctccatgtgcgtgtcacacatgcgtgcacctgcacccatacatgtgtgcacacacatggaaaagaaaagcccagattccagagtccaaatttcttcccaaatcccagatctgcagaagagctgcctgcaagcttctggcctgaaatgaggttcctttgcctctcaggggacttgggggaggcccccaggacttggcaaggttctgtttattcaggtccgggaaccccattatctggagaagttgttgtttctcagcaacttctatgccccagtgctgtggtggctggtaaatgacgcagtccccacaacactggaagacatttctggaccaagcgcttgttgcctctgcacagagtacagggctcctccttgtttgaagtttcaccctctatggttttagttagccaatgtcaactgtggtctgaggatactgaatggaaagttccagagataaacaattcatacgttttaaaataactccagctatagtatactgtcataaatgttccattctgtgtttatttattgataatcgcttcctatgtttaataaacttcatcagagatttacaggtgtagggaagctcatagtgtcttctgggtattgtccaaggcttatggatggtttggaacaggatcgcaaaacccaggagggagcagaatagaatgccaagtccatcgtagatcctcaatattcagaaaggctataagcaccctagcacctgagcaaagcaggcagagcgcgtgaggcaaccacagacacaaggcacttggcgtgtgttggggagtaagaggcacaaactgctttcctctacctggggctggcccgactgccaacctagaggtgcatacgnnnnnnnnnnnnnnnnnnnnnnnnnnnnnnnnnnnnnnnnnnnnnnnnnnnnnnnnnnnnnnnnnnnnnnnnnnnnngttttctgaggtttgtccctaccaaacttgtatgtgtatttcatccctagtgaaacaacagagttgaggggtggtggtggccacaaggggggattgtgtcactaaaaagtactaatgtctttctcagtttctcttctattgtttttcttccttctctcttccctcctttccttccttttcagtgttgcagattgaacctagggctccattgcttcttcacactaggcatatctcccagcccttgagaatactcatccatttagagacagggtgacaagggactgtctctctgtatttcctttctagcctgggctggcttcaaacccccaatcctcctgcctccccgtgcttcatgacaggactgtgccaccactcccagcttgtctctcactagtgaggggatgggactggttattgtaagtggattgttaaagagaccccctctctcttatacacaagctccttttctaagctccccacttgcccatccattttcccatcatgcacccctcagccaccatgtccttaaaccttcagaactctgatctaaataaactacccagcctcctggagttttcttatagtgacagggaagagacatcttaggtgaaattgctattcctattagtcaaaatagacagcaatcagcagttgcccacgggtcaaccttatacttacgcacacccacatacaaatctatgtgtatgtgtatgtgtgcacaggaattctcagttgccctcttcatggctgtgctaatagaaaactttagctccctgtgtaccacctttctgccatcatgtaccaccaaccttcccccgacccccgacgcgagtcatcatgccgattgtctctttacaggagagtgaggacctggagaaacagaacgcagctctccgcaaagagatcaaacagctcaccgaggagctcaagtacttcacatcagtgctgagcagccacgagcccctgtgctccgtgctggccagtggcaccccctcgccccccgaggtggtatacagtgcccatgccttccaccagcctcacatcagctcgccacgcttccagccctgaccttctggacaagaagggcgatgctactcccgtgatcccttggaggggcatgtaaactgaggccgggctgccctcatacctctacccagaggcccagtggcagaggcctggacaagtattgaacacaagaactgtagtggtcagagggacttaaggcctcccagggaagtatagtcaatgtactggactctcccagggaagtcgagccaatgtactggacccaaaaaatgacaagtcaaccctggactgtcatgaatgatgcccaaaatacacagcacagagggaggagggcagggggtggatagttttctaaataaatattttctaaaaaaccagccctggaaagcggcttccctcacttctcccatcagcatcgtgcgaactactttctcttgatttggcacctggttttccttcttggcttcagggagctcttccagactctatgaattccacttagctgtctgctccatgttttgttccctgtttgggaagctggtctcttcaaatcatcttcaacctctagctatctccctcacactcctccacagtgtgacacccccccccccagccgtgcctcttgcacggtgctttctctaaatggtggagccagtcactctacagttagagaaagggctgtataagacaggtcagggaaatctcagtttctcccacttgtacaccttcctggttggctgctgcagccctacagtcaagtctcaaggatgctgtggcaggttccatgccaggaatatgggtaacacaaacgcagcacctcccattcaaggccgtaggtaaccttttgccacaccctgccaaagacgcccttagaaataggacactcaacctgtacactgagtgtcccaaggttgagtagctcagggctgtgttcaatttggacatctggtagaaaccagtgttcttcatttccctttgatgtccacctgtttctcagaagtccccaggccacacatctgttggtcttcatgttatgcctttacccataacagtgcccagaagcaagaacagccgtctcctccaaggttgctttggagcctgtccttctccatagtctctgctgactggctgggcaccaatgaggtagataacccagggccagggctctgttgtaggcccagcccgtaatccctcagaatagcagaatcagtagaagccaccttcaactgccatgctctcatgaaggggaaggaggagtcggccctgtgcttgttagccaagtcctgacctgttggttagtgactctgatttccctaaagcctcattttgatggtccctgcccaggtgtctcttaccccctggaataagggcagtgttgagctgatgtgagcattaaacttcatagaggcctgactaacctgcctcctgcctatgacttccttgtgacctgtctatgagaggatctcagagcaaatcatggtggtagggacagagtgggctctcatcttggaagccattgcctctgcatgccccagagtagggctaggctgagcctgattcagagtctgcttaggatataggctgagcctgattcagagtttgctcaggttaccgccactgagtacccccttgtccttcagtgccatctctggaatcctaatctttggtctcccatcaaaacggcaaactggtgcttcccccccttccagagcagaggctccatatgtctgggatttgtgacggagagcggccttctcttcagttccctacaggaccaggatttgggggtcctggcccctctatcccacccagcggccccagcatgaaaccactcacttcaggtgccccgtgtgtcatctgtcatcatcttgagacacagaactctaggtccagttttctttgcagctgaccactacttggcctttcataggcaggcttccttccagtcagagatgtctcccctcacccctgctgtagcatggtgatttccccctagaaatcccgcacaagacacatgactggcccgggcatcttctgaatgagacttggggccagaactagaaatgcgatctcacgtgcgctgttcccatctctcagcagtgactcctcttcccctttcattccccactttctaatgaccctgggtggttccacttctcctttctgatcagcttggtgaaagcagacagcagaggtgcagtctctctgcacggggactgggaggggcagccactgagttcagacatcacaacccagcttagctgctcagtacaggaatgacacatcacaccaatggctggaccagttcttaggtacacacaggcaccgtgaatgcagtggatcagagtataacaaatgaatagtatgtcatgtctctgtagctccatccaatggggtcatgctataatgtaagtatagtgattgctatatctcccagtttgtaagacaagctaaaatcataattcctctatgagttccttttctctctctcctctctctctctctctctgtctctctctctctctgtgtctctgtctctctctctgtgtttacccctttccagtattgagggttgaagccagggcctccaatatggtaggcacattctgtgccactgaaccacacttcagcattgaaatccaagttttaggattatgagtctgtctgtctatttcgaggcactcaggatctgtaaccttggctggcctggcacttaaatagctcaggctggccttgaacttgaagcaattcttctgcctcagccttatgggtgctggaattacagacatcttctaccacactcttctccaatttctaaaataatctatggaccgacaaactacattgataggccagatttgccccttacatctgcttgacctgggacaaagtataaatgtcccatgttctaggtctcaatacctagacaccgttctcttctctggcaaagatgacttcacatctgccctgatgtgccagcttcaaatttaggatttttagacaccttggaatttgatcagttcaggtaatggggagacagacctctagtggcagtcagtctgttcttgctccatccctggctcctcctgtccacagcatcaaactctgttcacactccagccccaggaaggacaattctggaaagaactgcagccatgggaggagcattagcttagggagtctgggcatcctggagacacagagcactgcgggctctgaggaggtgtgcctcctttgtcctagggattcctttcctcgagccaggcgtggtggcacacgcctttaatcccagcagttgggaggcagaggcaagtggatttctgagttcgaggccagcctggtctacaagtgagttccaggacagccagggctacacagagaaaccctgtctcagaaaaaacaaaacaaacaaacaaacaaacaacaacaaccaaagatcccttgccccactagaaggaataaaaaaccaggagacagaccaggttaccagctgctggaccacaactggctggcaatgtatatttgaatgtatacttccagcccctgtcacagttgctcctgtggttttgtgacacaggaggtgaggcatctgggtatcccacttacttggaggacaggtaggctgtctccatcctccttctgcccaggttcccttctctccaactgatttcagcattccaaagttgttccagggagtcctagcaatgaaaggggttaaggaaccaagaccaacactaacttccagttctgctttgttttgtttatttatttttagacatggagtctttctgtgtctatgtatctagtctggcttctaacttcaaatccttctgcctcatcctcctgagagtagggattgtaagcatagagagaattaataccttaagacccgccaaagggcagtgcgtgactcaaaggaatgtgtttctcttgattttaggtcaccaacactgatgcagggatgtttgttagaattgttgctatagagatgagcagtgtctgccctagtcttcagtaccacacaaagagtgggaggtaggactagaaaggggacagagatgtgccaatcctaaaactcttgtggggtatgtggcttagttaagttcaccatgtgatgtaatgaaataccatgaacaagaacttggggaggaaagggtttatttggcttctatttccacagcattgtttgtcactgagggaagtcaggacaggaacttgcaaacagggcaggaacctggaggcaggtgctgatgcagaggcttggagggatgctgcttcctggcttgctcctcatggctcgattatcctgctttctttcttttcttctttcttctttctttcttcttcctttcttcctttcttccttccttctttctttttctctcctttcttctctttctttctttctttctttcttccttctttctttttccctcctttcttttctttctttctttctttctttctttctttctttctctctctctttctttcttccttccttccttctttctttctctctccctcctttcttttctttctttcttctttcttctttctttctttcttctttctttcttttctttctttctttctttctttctttctttctttcttccttccttccttcctcccttcctcccttctttctttttctctcctttcttttctttctttctttctttctttctttcttccttccttctttctttttctctcctttcttttctttcttccttccttccttctttctttttctctcctttcttttctttcttccttccttccttctttctttttccctcctttcttttctttctttctttctttctttctttctttctttctttctctctttctttcttctttccttctttctttctctctccctcctttcttttctttctttcttccttctttctttctttctttctttctttctttcttccttccttccttccttccttctttctctctccctccctcctttctttctttctttctttctttctttctttctttctttcttaactttttattgactcctcatgagtttcacatcatacaccccagtcccgctcccatatcccctttcaactttgcaacctcccccccaacataaaaaacaaacaaacaaaacccaaagcatagaaaacatctcattgtgaaagctgtagtatgtcacagtgtgtcccacagtatatccttctgtccacacatcttcacttgcaaatattcgttgcattgagtcagagtcattggtctggttagagatctctggcttctgtgacaccatcaatattggattcttaccaggactcctcatggttatcctgttgttgccccgtgtcatggagatcctgcagctttggaacaactggactgaccctttcacgtgacccaacttttagcagatgatatagatttagggtgtaccaactcagatcttggcctaccaggcagccaagctagtcagcccactcccgcccaggtccacctagaccaatagggtctcccttatctacatcaccaggggagcttgcagtactactctggctaggccacccaatgcaccatcagcaggacgcaggttcaactctgttctcatgacttctcaccggctcacccacacctccaccatcaaggccaactccatggtgttgcctagatgaggtgtacggcctgctctcctgagtggtgcagctggtgaggggtagggccagctctcccacactcatgaccctgtgggcagctttcccgactgtcagaggtgataggggcagggcatgatctctgtgcccatgccaccccacgacagtagagtgctgtccctggtggccaccctggcccccgactctcatcttgtttttatgctgatatgtgatgtgagttaactcccttaagataaacaaaaaccgaatactgcttgagtaatctactggtaagcagagctaagaaaccctctcttagagaatttcataggaaaaggcacagatggatcctgtgctcaggggtctgcctggtagactcctgtaaaaacgctgccaagcctgtcaatgacaaccatggttgaaaggggtggcagagactggtcattgtcttatattttcttggcaataagataataagttccatcttcctgcctacattgcagctagacctggccatgtgacacagttctaaccatgaactttaaacaagtaggtcttacaaaaaaagctctttaaaaattgaagctgtcaggggactgaagagatgggtcagtggttagagcacttgttcttgcagaggactagggttcagttctcagaacccatagggtgactcaaagccatccataatttcaattccaggggatcttatgtcctctgaactatgagagaaccaggcacacatggtgcaaatacacgcaggcaaaacattcatacacataagaataaagaaatctaaacaagacaaaacagtgaggctatcccagtgagcacacacattccccacctcttttttttttttttttttttttttttttttttgcctgaaagtagatgtaatactagagagggagccactatcttaggaccatgagcaaaccatgcatgcatggaaagaaaggaaagagattctaggtcactgataattttaaaaaaaatggggggggggggctggagagatggctcagcggttaagaacactgcctgttcctccagaggtcctgagttcaactcctagcaaccacatagtgactcacaaccatctgtaatgggctccaatgccctcttctggtgtgtctgaagacagctacactgtactcatatatattaaataaataaataaataaataaataaataaataaatattttttttaaaaaaatggctaaaaccataatggtttaaaaaaaataccattcttaaccgtgcatggaagtgcatgcctttaatcccagcaatcaggaggaagagacgggnnnnnnnnnnnnnnnnnnnnnnnnnnnnnnnnnnnnnnnnnnnnnnnnnnnnnnnnnnnnnnnnnnnnnnnnnnnnnnnnnnnnnnnnnnnnnnnnnnnnnnnnnnnnnnnnnnnnnnnnnnnnnnnnnnnnnnnnnnnnnnnnnnnnnnnnnnnnnnnnnnnnnnnnnnnnnnnnnnnnnnnnnnnnnnnnnnnnnnnnnnnnnnnnnnnnnnnnnnnnnnnnnnnnnnnnnnnnnnnnnnnnnnnnnnnnnnnnnnnnnnnnnnnnnnnnnnnnnnnnnnnnnnnnnnnnnnnnnnnnnnnnnnnnnnnnnnnnnnnnnnnnnnnnnnnnnnnnnnnnnnnnnnnnnnnnnnnnnnnnnnnnnnnnnnnnnnnnnnnnnnnnnnnnnnnnnnnnnnnnnnnnnnnnnnnnnnnnnnnnnnnnnnnnnnnnnnnnnnnnnnnnnnnnnnnnnnnnnnnnnnnnnnnnnnnnnnnnnnnnnnnnnnnnnnnnnnnnnnnnnnnnnnnnnnnnnnnnnnnnnnnnnnnnnnnnnnnnnnnnnnnnnnnnnnnnnnnnnnnnnnnnnnnnnnnnnnnnnnnnnnnnnnnnnnnnnnnnnnnnnnnnnnnnnnnnnnnnnnnnnnnnnnnnnnnnnnnnnnnnnnnnnnnnnnnnnnnnnnnnnnnnnnnnnnnnnnnnnnnnnnnnnnnnnnnnnnnnnnnnnnnnnnnnnnnnnnnnnnnnnnnnnnnnnnnnnnnnnnnnnnnnnnnnnnnnnnnnnnnnnnnnnnnnnnnnnnnnnnnnnnnnnnnnnnnnnnnnnnnnnnnnnnnnnnnnnnnnnnnnnnnnnnnnnnnnnnnnnnnnnnnnnnnnnnnnnnnnnnnnnnnnnnnnnnnnnnnnnnnnnnnnnnnnnnnnnnnnnnnnnnnnnnnnnnnnnnnnnnnnnnnnnnnnnnnnnnnnnnnnnnnnnnnnnnnnnnnnnnnnnnnnnnnnnnnnnnnnnnnnnnnnnnnnnnnnnnnnnnnnnnnnnnnnnnnnnnnnnnnnnnnnnnnnnnnnnnnnnnnnnnnnnnnnnnnnnnnnnnnnnnnnnnnnnnnnnnnnnnnnnnnnnnnnnnnnnnnnnnnnnnnnnnnnnnnnnnnnnnnnnnnnnnnnnnnnnnnnnnnnnnnnnnnnnnnnnnnnnnnnnnnnnnnnnnnnnnnnnnnnnnnnnnnnnnnnnnnnnnnnnnnnnnnnnnnnnnnnnnnnnnnnnnnnnnnnnnnnnnnnnnnnnnnnnnnnnnnnnnnnnnnnnnnnnnnnnnnnnnnnnnnnnnnnnnnnnnnnnnnnnnnnnnnnnnnnnnnnnnnnnnnnnnnnnnnnnnnnnnnnnnnnnnnnnnnnnnnnnnnnnnnnnnnnnnnnnnnnnnnnnnnnnnnnnnnnnnnnnnnnnnnnnnnnnnnnnnnnnnnnnnnnnnnnnnnnnnnnnnnnnnnnnnnnnnnnnnnnnnnnnnnnnnnnnnnnnnnnnnnnnnnnnnnnnnnnnnnnnnnnnnnnnnnnnnnnnnnnnnnnnnnnnnnnnnnnnnnnnnnnnnnnnnnnnnnnnnnnnnnnnnnnnnnnnnnnnnnnnnnnnnnnnnnnnnnnnnnnnnnnnnnnnnnnnnnnnnnnnnnnnnnnnnnnnnnnnnnnnnnnnntctccctctccctaattggactccccctcataaagtaaaaggaacaccaatttctggagcccctaaattctaaagttatgtaaataaatcaggaaaggcaggctaaaagtcaaaagaatataagtaaaataattcaaagtccatatgacttaattcaaaaatcacagttatatgtaattcttatggtatatcatgattttcgtgaatctcttaatatagttactgactcaatattcagaaagagttgttttgcatatagaaaactgctgatttagaattaacatcactgtttattcaacaacagcaagtaatcagaaatagaaatcctccattatataacacatatccaatcccatacaggtctgccaggccctctagcacaagatcatgatgaaatcggtcaaccattaataggatacttgctagaagcttcagaatttcattttaaaacacactatttaaaaggggatttttctatcacttgacaacacactgagggaattataaggaaatgtcctgcttgttctttgtataatcaaactccgttaactggaaggagtaaccctaaaggtcccccaaagaaattaaattttgcaaatggatatgtttcatttgcagagtttagaaagattaaaatatgtgcaccataccgtagacacgtattcaagatttcagtgggcacagctttaagttctggaaaggatggttttgtaatgacacatttaacagaagttatggcaaccatgggaataccctacaaattaaaactgacaaggctccagcatatgtctctagtaaaatgaagcaatatttttgcctactacaatagaaagcatattgcaggtatcccacacaatcctacaggacaagcagttgtagagagatctaattgtatttttgttttgttttgttttgttttgtttttcgagacaggatttctctgtatagccctggctgtcctggaattcattttgtagaccaggctggcctcgaactcagaaatccgcctgcctctgcctcccaagtactgggattaaaggcgtgcaccaccacgcccggcaaagggagtccaaaaagcctacagcacctggcattcccaggaggtatcccatccaagtactaaccaggcccgaccctgcttagcttccgagatcagacgagattggtcacgttcagggtggtatggccatagacctaattgagtttttaaagggatgcataacaaatgaaaagggataacaaagacccccagagaaaaattacataagattttactaacttcattttttttttggtttttctttttttttctttaagatttatttatttattatgagtacactatagctgtcttcagacacaccagaagagggcatcgaatcccattacagatggttgtgagccaccatgttgtggctgggaattgaactcaggacctctgaaagatcagtcagtgctcttaaccactgagccatcttaccagcccaactttaaattttttaaatgctaatgaacaacaaaataaacaagcaaacaaaacagctgttgagagacattggattacaggaaaaaaaaaaaaaaacgctgagctaacccagcctgtttatattaaagatatcctaacttcagaatggaaggaaggaaatatgttatgttggggaagaggttttatctttgttttaacaagagaagaaaagctatggactccttcaaacctaataaagattagatttgaccagagaagacttccagaagaccctgacttcaga

SEQ ID NO: 44 - DNA, 912 bp, Mus musculus
gcagtccctctgcacccgagagagaggaggacgcaggggtctgtcagaggttgctgttgggcaagcaggggaggtacctgtggaaggtggtgtgctggtggccccctagcagtcaagaaggggagccagctagtgagaagatcgcccagaggcatctgggacggtgtgggagagcccggaagattagaaccatgcctcacagctccgacagcagtgactccagcttcagccgctctcctccccctggcaaacaggactcatctgatgatgtgaggaaagttcagaggagagagaagaatcgcatcgctgcccagaagagccgacagagacagacacagaaagccgacacccttcacctggagagtgaggacctggagaaacagaacgcagctctccgcaaagagatcaaacagctcaccgaggagctcaagtacttcacatcagtgctgagcagccacgagcccctgtgctccgtgctggccagtggcaccccctcgccccccgaggtggtatacagtgcccatgccttccaccagcctcacatcagctcgccacgcttccagccctgaccttctggacaagaagggcgatgctactcccgtgatcccttggaggggcatgtaaactgaggccgggctgccctcatacctctacccagaggcccagtggcagaggcctggacaagtattgaacacaagaactgtagtggtcagagggacttaaggcctcccagggaagtatagtcaatgtactggactctcccagggaagttcgagccaatgtactggacccaaaaattgacaagtcaaccctggactgtcatagaatgatgcccaaaatacacacaccagagggaggagggcagggggtggatagttttctaaataaatattttccaaaaaaccaaaaaaa

SEQ ID NO: 45 - DNA, 378 bp, Mus musculus
atgcctcacagctccgacagcagtgactccagcttcagccgctctcctccccctggcaaacaggactcatctgatgatgtgaggaaagttcagaggagagagaagaatcgcatcgctgcccagaagagccgacagagacagacacagaaagccgacacccttcacctggagagtgaggacctggagaaacagaacgcagctctccgcaaagagatcaaacagctcaccgaggagctcaagtacttcacatcagtgctgagcagccacgagcccctgtgctccgtgctggccagtggcaccccctcgccccccgaggtggtatacagtgcccatgccttccaccagcctcacatcagctcgccacgcttccagccctga

SEQ ID NO: 46 - DNA, 44567 bp, Homo sapiens
accctggcctggagatgtccagctgaagaacagagaatgcttggttgggaggtagagacttgagttgctcagcaaagtaggaataaaggtaacagggctgtgagatttgggagcagtaacagagaaagcctcagaagggaaggggtagacaggcacagaaggcatgagaagggtgactttcgagggaaactgtagaaagaggattttttgatttttttttttttttttgagacagagttttgctcttgttgtccaggctggagtacaatggtgcagtctcagctcactgaaacttccgcctcccgggttcaagtgattcccctgcctcagccttcctagtagctggaattacaggcacccgccaccatgcccggctaatttttgtatttttagtagagacggggtttcaccatgttggccaggctgggcttgaactcctgacctcaggtgatccacccacctcagcctccccaagtgctgggattacaggcatgagccacggtgcctgtctagaaaaaggatttttatagaaagttggtatgtgatgttattccctttttcccttttcttttttttttttttttgagacagggtctctcttgttgcccagacaagagagagtgcagcagcatgataacagctcactgcagccttgatgtcccaggttcaagcaatccccccacctcagcctccagagtaactgggactacaggtgtgcaccaccacatccagctattttttaaattgtttttagaggtggtcttgaactcctaagctcaagtgatcctcctgactcagcctcacaaagtgctgggatcataggtgtgcaccaccccatccggtcttactctctttttttcaatatttctattggatgagactctacttggataatcccagttttatatgggttacataaaacaaatattacggcagtaatagctaataggcactgtatgcttactaggcactaatcattgcactaagcaatttaaatacattcagtggtatgaggtggcaccattatatagatgaggaaactgaggcacagagttttaagtgattgtccaagatcacagagttatgaagcgacagagccagaatattggatttcatattgaaacccaaagctaagaggccgttttcgtgttcctgctttcctccttgaccatgtctctctctgtatgctgtcagggttgagtgagtgagggaaggatgctgaaaagtcatttggttcaggcctcacattttcaaagcacttaactccagtgaggccgtatatccagcctgagatatttagccgggcctgagagatgaggagatttacccagcttttgagttactttccatttattgatgctaccacctccagagacccaggaattaaatactcatataaattccatcattttctggttgtagtataagtacattacttttaaaacataccatattttttgttaaccttattttgatatatcttcatttttaatctgatgggaaactgaaaaatggagtggcctctctctcaacctttgagaggcctcactccctttcctactgtctgaaaggtgcaggaagaggaggccctgcaggaagcagctctgatgcccactccggctgctgccagtggctggctggatgtgctatcagcatggccatacccacaggttgaagtaggtcaacaacctggggacccagaagctgcgtggtgcaaagtgcatctatccggaaatttcctgagcttcaagggggtttataaggcagccaccaggcccagactgaccaagagaacaggagctttggatgcatgttctttaacccagtggctctcacctggggcgatttagcatctcctccccgtagaacatctggcaattctagagacatttttttattttcacaacttggggttctaccagcaactagtgggtggagaccagagaagctgctaaacatcttacaatgcacaggatggcccaccgccacaaagaattatccgccccaaatgtcaagagtgccacagttgaggaaatgtgttctaaccctctggggctggccttatgaagcgcagccacacccctcctaagaggcttcctccaaggctgcaaagcctgagagggctggactgtaggccactccgccgcgggatttccccttcatcacctggccacccactctggcccccttactggagggctccgccctcaggtaaatgttttccctacttgtttgggaaactttgagaaaaatcccctttagccatcttctgagcagtgaagatgtaccatgtgtgctttttccaccaaaaaaacattaaagcggctaggggatttttattattttagctcaaataactaaatagtggcagccaactcctttaaaggcgactgtcagccctcaaaggggcgctcagatggaactcagaaaaaattaaaaaaagagtgagtttagtatcagtggatcaggggagtggggataacctgggaattctggtctggtggggcaggcgacacagaccgaaggcctccgcccacccccagcctcaagccccctctgcgtggggcccctgggggcctggggacatttgcatgtactctcaggagattctcctttcttctccctgggtttcatctttaataactagatgatgggctgttggggaatgcagggccagcgctctaggaaagtgaaactgccttgcagagggaaagcaacccactgtggccccgaaagacccagaccgccagcggccccgggcagccgccgagggcaccggctcacacttcctgcatttcacaagctcttgcttggcatgcattgatgacttgaactggggggttaacccaaaaagatcaagtgcgagctcaaggcggatgatgagaacagattcggggctggttaacctcagagagcgggagtccgttggtgctaatgaggccaagggagcccggctcctttctgcccccaggcaggtgagaaagaaagaacggagacgaaagagggcccgctgtgtctactcctcttggcccagaagcccagctggaccctgaggccacaaactgccccccactggagaaatcgctgcaggatttctcctccatcaaatcgctgtgtcagagccagttgggggcttttaaaagacgcccacgctcaggcccgcaccaggccacctacactggaatatctgaggctaagtcccaagctagaatttcccatcttctttctggccttgggagattttgcatctccttccagggaaggaagcctgacttctgaaatgattctcacgaaggagaagtgctccgttctgcagtgagcctggccaggggggccacaccacagactcccaggaggcttctgctctgcgtggttcttctgctctcgtttccttaacgattgggccagagcatctctgctcttgtaaaatagcaggcaattagatctcgaagtctttgaagtgggcagattcaccaggcgttggactgaagtttctatttgtcctggcactgagaatagcaaaggaacagggggactgaactggtaaggatatagcaggtttgttgcacttttaaaaaatatgttttcaattaccttaagaacccatttatgtgcagtatatcctgctgctgattttgaacaaggatgatccaataggcactggtattaaaacgctgaaatagaggttgacaagtagctgcttccctaaatccttggagtttccttcctccctccttcccctcctttggcaccaacccccttcccacctccccaagatccagcaactaaaaggttatttgcttggcacggcagggagtaggggctgtgctgaatggtgggaacccacgctacatgggttgtcagctgtgtcacccctaattagacatcatttcaatctactcatgaaagcagcttgctgcaggactctgtgctggccatatttaattagagcagtataaggttttttttttttaagttaaaaactcatattgtattgcccatgtaccagagactattctaagaactttacaaacattaactcatttgatccttataacgaccctatgatattggtggtgtgatatcctcccgttttctaggtatggaaagaggcatagagaggtgaagtctcttgctgatatcttctagaccgggctggctgcagggtctgttgctctcaaccagaggaaatagaaccatgaaagaacaaggtagggttttcctccttctgccaaactgagattcacaaagtggactctagcattcttcctctctgccattccctcccaccaaatttacacctggggaaacagtggcccagagagggaaggagaccttcctacaatctcagagtcaattgggggcaaagctaggaccagaatgctgcctctcaactccccctcgacctcatatcatattgcttacatccagctaaatgtctcctcagaaatcagttggggaatatggtgattttaagtccataaattctttatttaatactcctccctctaagaggtagagactcatttgcctcccctcaagtgtgggctggactcagtgctccattctacttttttcttttaggtcagcctgttgcccaggctggagtgcagtggctcagtctcaaatcactgcaacctccgcctcctgggcttaagtgattcttccacctcagctctgcccagctaattttttgtagagacaaggtctcaccatgttgcccaggctggtctcaaactcctggactcaagcaatcctcctgcctcggcctcccacagtgctagaattacaggcatgagccatgccacccggccccaagagtagaacaaagatggaggactaggtcataaaagacactgcaactcctctctctctctctctctctctctctctctctctgtctctctctctttctttatttctctctcttgttgttcactctccagggagccagttgccatgtcatggggaggacactcaggcagccccgtggggagactcatgtgaggaggaactgagatgtcttgccaacatccatatgagggagccatcttgtaaatgaatcttccagtcccaatcaagtcttcagatgaccagagcctcagctgataacttggctgcagcctcatgagagatcctgagccagaaccactcagccaaggtgttcctagattcctgcctctcaaaaactgtgtgagataatagatgcttattgtttaaagttgtttagggtaactcattgtgtagcaatagatagctgaaacaggaggctctacatttactcttttttttttttttttcttggagacagagtcttgctgtgtcacccaggctggagtgcagtggggcaatctccgctcattgcaatctgcgcctccctggttcaagcaattctcatgcctcagcttcccgggtagctgggactacaggagtgcgccaccatgtccagctaattattttgtatatttagtagagacagggtttcaccatgttggccaggctggtctcaaactcctgacctcaagtgatctgcctgccttggcctcccaaagtgctaggattacaggcatgagccactgcacccagcctacctttattcttaaaatgccataaatgcacagagtgttttgaggagtcttttatcccaaagtattccaactatatttcttttaaaaatttagggcaattaaggcattttaatgcatgtgaccctccccgccccacattcccccacccttcattatttcaaactggagtggtcttttgaattttttcctgaacgtgtttccagaaagtttataccaagtaaaacagctatatccaagttcctagtaattattacagcaattacaagggttccaagcctaataaagtaatctaagggcaggaggtttggaggtatggttatttcttggcattcttctaatgacagcctggagctgagtagcatcttggcagttgtctactgtttgaatacgttagactgctcccaactctgtcacttgctaactgtgtgaccttgggcaaatgatcgaactctctgtgccttaattgcatataaattttagaatctaattatgatacctgctctgtggaatcctggggaagattaaaatgagatgtggtagagcatggtgcttataagcattgaaccaaattgcctgagtttgagtcctagctccagtgacttttctagctgtatgatcttgggaatgttacctaatctccttgtgcctcaatattccacatacataaaatggggtgaggtggggaaacggtgcttacctcctgtgactgtcatgagaattaaatggagccaattcatatactattcccggtacacagtaagtagcatatggcaaggatgctaggtatagttgtgcaggttgttcactgttcaagggctccaacctgagaggtcaagtgagggcttgccaggccatacgctttggtatgaggttgcctacctagaggtggcgctgttttctagtttgtaccaggccctatatcagccagctgtcagcataagggtttgtagtatccagcaaccactaccttaatactatctttaggctttaggctgatgttcactgagcacatgccagttttattataactgttacttggtagcttcctggagttctccaggataacatcagtgggatgtgtatatcccaaaccttgccattaccattcagatacaatgctgaaaatcaaataaaaaatattagcaaggtaaaaagtttaaaatcctgcaggacaatattatatattgcttaggcatacatacaggtttggttcaagtatagaaaaatgcttaagaatgataaaccccacatctggataatgggttacctggggtggggaggaagcggaattagaaagggatgaaggaagcttcggctctattcataatttatttcttcagcttaatggtggctacataagtgtttattattttttaatcttaaatatttaaaaataatgtataattaatactattaaataagacccgtctttttatgtaaaaactaattttgcatttctctcattagtctctgttaaatattaaatcagtacattgattgggaatgacagaatcaagcaatcattcattcaacaagtgtttacttgttgaatgataggatgttcaaagagctaagaacttcatccatacgctgtaatacttagaacgcttgtaacatttataataacctgtttggttatttgactatgttttcttttttctgtgagagcagagtctctgtcttattcatatttaagaattctgctctgtaataggtgataaataaatgttaatttaaaccgaatgaaacataaatatgactattattgtcctgaaagggctttcaatacactaggataatgcaggtcataagtgccataaatgaagagcaaagtgaattcacttatgcattcattcgtttgaaaaccatttactcggcatctgttaggtactgagcatatgactataaacaagagaaacacagactttggtttttacagggcccacttctcaccactttcatcactgtctaactggcctatgctgccagcatcttttgtttggatggttgcagtaatccaatactgaaatcctgactcatctccctgcttccactttgctcccctatcgtaaaatctcaactgtgtccagagagatcctctaaaaacctaagtcagatcatgtcactcctctgctctgacacctccaatggcttctcatctgtaggagattgtagaaattgccacaattagttaaatttttcctatcgagaagtgaagtctgtttctcaactcattgagtctgaactggccttgtgactttcctcggccaatagaatgtggcaggttctgagttctgtgctagctctgagcctgggttccatggggcttcgaatgcttctgctcctactcttggaatcctgccactatcaaataaacatgctccgaccagcctgttggtggatgagagaccatgtggaggagaaatgcccaaggcaaagccaggccagaccagtcaattatcagccaacctaccagctgtctgaggacacatgaccgagcctagccgagatcagcctagcccagcctatccccaaagaacctttcagatgacccacagactcatgagccaaataaatggcttgagtcatcgaagtttctggtagttttttgggcagcgaacactgatagactatctcatttagacaaaaagtcaagcttctttttactaactgtatcctcagtacttagtgcctggcacatggtagatgcaccatgaacgtttgttgaatatattaataaaggtgtaaatggttttaacattctattgagggaaacaggaaaaagataaatcagtaaacgaataaaataagtataaaattgggtaactgctatgggagaaatgaatagtagctgaggtagaggataagaatgaaggtggaaggggaaaccctccatgggctcactgtgtctttcagaatgaaagctaaaatcctgatgttggcctctaaggccctccctgaccgggccattacctcactgacctcatcgcctgccacttttgctgcctctggtatccaactacctggcccccctgctctttttccaatactcaagcacacttccacctcaggtcctggaatgtccttccctgagacactcaccattcactccctctctttcttcgaatctctgctcaggtatcccctctttgggcaaggcccttctgaccacccagaattccctaacctccaaccctgctttattttcctccataggaaaggaattttgtcttacttaatttaaccttagggcaatattgtcttagtctagaaattcagctcatggatacaaaaatcctctaggagccgtaacttcctgtcaatcctaaaatttaataaggcaaatgtttggcttcgagccatactgggaataaggtaaggccttttgaaaaagccacgatgcccaggtgagggttgaattgatcactgagaaccctacaaatgcgctcatggcaaggctgggaataccctacacttaccctctcggtcatttacttcagagtctgcggggcattctaatccgcgttgtcatttgctttgtgccacattcctaagaggtaggcagggcaggttttatcatcctctgtttacagatgaagataatgaaggtcacatagctcaagtgagctacccagggccacagacatacaaagtggtagaaccagaatttaaatcttggttggtctgactccaagtgtagtatttgtttcactttttctttctttctttctttctttctttttttttttaactgtttctccattctgggttctgaccaggtgaccttgaatcataaagattcagggcctgtcttgagctgctcaatatggaaggcatcttttctctaaagagtgtgagctccctgccaagcagcacaggcgcttaataggctttcagagcagcaattctagaacctcccttgtggctttctgatctcccacagcccttgtgtttgatggtcaggaaaggagaatacccttggatcgtcttatctccagaccaccccgaggctggctggacttaaggggtgaggaaagacaagatgggtgagcagctgctttcggctgaaaaccagaaagaaatcccagtgtttttgctttattttggtttaaaaatcaagtcgtatgacaatggaaacattttcctggttgtcctctcctctctgcccatgttgacagaagacggacttgctaattctggctggggtttttccctgcctgggctgtttttctcttttatcttcatcaattgaagagggctgctgtgtctttcaaactgtcggaaggtatctgtatttttttttctttcacataattctgtaggtcttttcccagatatgtatttttctctctaacttctaactcgctgaagtttccgcccatgtgacttccagcgtgagttaccagaaaccacaagagagagagagagcgtgcaagccccaaagcgagcgacatgtccctttggggagcagtccctctgcaccccagagtgaggaggacgcaggggtcagaggtggctacagggcaggcagaggaggcacctgtagggggtggtgggctggtggcccaggagaagtcaggaagggagcccagctggtgacaagagagcccagaggtgcctggggctgagtgtgagagcccggaagatttcagccatgcctcacagctccgacagcagtgactccagcttcagccgctctcctccccctggcaaacaggtagagtcctcctttttctctctcctaccttctgattctcctgggggatggaaagagagccaggcttccttgtcctgcccagggagctgaggatggaggaagtggctcgttgcacgggcactctgttagacttaggacatggaatttgctactaagctgtgcatattggcagagatcctcatccttccacccattcttccaaagcccctttttctctccattttccaaggctgcctatcacctctgcctcactggggttgccaccctaaaaagctttctaggaagcaaagaggaggatgaacatcaaagaatgcagagaaaagagtctactgttctccaaggctgtagaaaagtgagaggagttttcaagtgggccgctggcatgcacagctcaaatcctagatatgcagtttcccaggagacagccaatagggaaggggagaaaaggggttagggaaaagttaaaaaaaaaaaaaagaagaagaagaaggagaggaagaaggaggaggaggaggagaaacccagggctagcatagaaggatctctctactggggcactgcctctgttgctagcacagccagcaaggggagatgctagaggtccagccaatatctctttgcttgtggcttctggataggagcaaggaaatgaatgaggaggtggctctggaaatttgttggaagacatttgctggtagttcatcttagctctggggaaaccagagagactgagatagggattgtgggagcatttggagtctagattgtgacttccaagtccaaaggttttagcttgaggattaccaaaaaaggagtgccctgcccatctcacagcttctagggttttgttctgcaccacactcttgacatcccttgctgtaggaagccctcctctttctcatccgacatgtatccgtgggttaaaattttctcaaccttcatagtttaaaaacttcattctttccttagcacagatatccacaagggttttcaaaatgctgcagccaaaataaaagtatataaatattgaacagggcgtatatcctaagcctctaataacggagcagcaggctgggatgagtctgggtggagacctctagaaggcacagaatccagtctgctgctcaagatggtgtcagagtggctctgactgcctggaagtttgtacttttcttaggaaggaaattactcatggcttccatggtaacctggtgccccatcccccttagaggaagagcacttccttcctatctatgccaatgacctcctaccacaaaggcctgaaagtattggacatgttggtgagcccagtacttagtgatcccagagctttgcccttggatctgtgcccctctagcctgtgggagacgtggaagggaacagggcatgagttgccaggactcctacacctacactgcagcatctgggagagaactggagctaacctctctgcccaggcacaggacatgcctctctctgggtgtaattagagaacacccaaagatccccttatcctaccaagcacccatctactgcccaccacagccaggtcacctccaccattaacgttctttttggcattgatgtgccaggcattgtgctggggccatggggaatgtcacagtggctgagcacaacggaaggaaagaggaggcagatctgggatgcaccctcagctcaggaatgcagcagaagaccacatggggtgcagagtagctagcggggaagggtcttggaaagccattgggctcagcaccagaagatgtagcactctcagatgaccaggagtccttgggcacactcttagagcctcagtttcctcacatataaaatggaaatgatgatatcaacttcacagcattggggaattaaacaagagcacctctgaaagaacacttgcccagaggttggcatatagtaggcactcaacaaagtctgaaaaaaagaaaacagctaaaagaacagcaagaagagcctaaaggccaaaaagtgagagggcgagggtggagcagccctacagaggagaggtgataaaacacacttcatcgccttaaccattttttttttttttggccaaatacagctctattgagtcctcaagttctcttttctttttcctgtagctattggtcaaaaaagtcagagacctgggaatgtgtaagcaggcatggagaagagctctccttcgggtgcaggcttttggtaaatagagggatggagggttcatgcagagacgaaggcatggaaggatggctggacggataccacacaccaccagagcctgctttcactcagaagggagatgcagacccatgtaatcctccccgtctctgcttcccaggactcatctgatgatgtgagaagagttcagaggagggagaaaaatcgtattgccgcccagaagagccgacagaggcagacacagaaggccgacaccctgcacctggtaagtgttcagatcaatcttcatcctcgtgagctttaggctttgccctccgccatctgggaacccttggaccatagctttgattctgcttgtgtggggatgtgtatgtggggtgggttagtggagggtgagggccgtggggtgaggtagggaagggaagctgtcgtgagagtgctttaagaaggctctgtagtccgggcgtggtggctcacacctgtaatcccagcattttgggaggccaaggcgggtgggtcacctgaggtcaggagttcgagaccagcctggccaacatggtgaaacctcgtctctactaaaaatacaaaaaattagccaggcatggtggtgcatgcctgtagtcccagctacttgggaggctgaggcaggagaatcacttgaacaggcagaggttgcagtgagccgagatcgcgccattgcattcaaacctgggtgataggagtgaaacttcatctcaaaaaaaaaaaaaaaaaaatagaaggctctgtagcagggaatgggccaggaggctgaacagagaaatgggcctttctaccccaggagggctcaaggggtgggagaaggcagagctgtattgggaaagaatttagaaggtatcaagtgctttggggacggcccattgtctcgcagtgcaaggaccacacatagtcgcatcccttggcagagacccaaatgcccctgcatttgacacaaggaaattcacagggcgctgtaccagattcctcttttcagagcattattaaagtcttattttgaaatttctgtctttaatggtatcccaaggggtctatgaaagatgcaatttcaagtgcccttatctgggatgatcaccatcctagttgagttgcctctagtcccaaatttttctagagaaagcttttacctctgtcttgagtggtccaggggccttgagcagtgctgaactgcagttccgccagtggccaaggccctagatggtgtttctaggttctggctgtgccccttataaagtactgcttcctccccattgctcataccttaccaccttacctctcttcactctgcccccagtatggttcttgttcaaccaactcttcactagttcctttctctccatcccctcatccccttccctagcaactctaccttcctgcccttgctccagaaacattcccttacctctaatagcctagcaattcctttccatggaaaaagtgcaattggcaccaaaaatcaataagcttgtatttatctggaagattagcatgataatcagccagttagaatggctgtgttaaccgtatcaagaataagtaagtaagatgtagttttaggggaaataatgcatctttcagctttacaaggaaacagagcagactgcaccaacagctctgattgggtgcttgggttttatttgaaatgtattcagcttacactccattgcacactaacattaaattcacagctatttgttaactttttggaaagaatgaatgaacagaaagtctgtactaactgtgctcaacagtctgaatgtcaagtttttggtggccctgctgcttgtatgttctccatgatttcactgtgtccccacattctggtttaccaccttaagcttgaacatctatgatccttacctctttctctatcagagtctgattctgattcagtattctttagggcaagcaaacagaccaatcaaaatttaaaaggataaaatcttccttgtgtacaagtagacaatgtcctcagactggcaaactgctgtaagctttttaagtgtgtacctgttttcttaagtggaatgtaagtatagttcggcagctcagcagtcagaacagggattgaatcccagccctgctgcctactatctgtgtgacagagacgttcttggcctcccttgggcttggtttccttatctagaaaatggaaaatgacaataactaccctatacagatcgtacatttaaagagcccaacacaatgcctgtcattcataaatactcaaaaatttaagtataataagagtaataataattatcataagaagcaagataatcacaaattatacacacattttatatatatatgaaaacatatatacattttgtgtatatttaatcacagaagctcagggttgaaaggtttcttaaaggctagaaagtttagacataagtttgatgcttcagacttctctgcaacacctccagccaatggtcccattgtatgcctggtcacttctagggctggagatcttcctctctcccaatttatgaacagaagagtctttcctatgttaagctgcacccctgtctccctgtaaattcaactcactggtcttcatccaaacccttggggaacgtattaatgagggtgacacagatgtctctttgctgcggcaaggctttcagcactgaatcagctctctccctctccaagacaaatgtcagagcccaaagagtcagctcatctaattatacaagtcatgtgacattagggtaatctctagagcttgagggtccacagagccccaagtcatatagtcaacatatccatagccacaccccagcctcagtttctagaatgttccaatcttccccacatctgaacacagattcctcctccactgctttcttttgagcaccacagcatcgtctttaccttttgcccaatgagtaggtcgcagcggagttgatgcagcaagcctgcggactgctgccaatgcaacttatgtttcttggcttcaggtagaagcttttggcagcaacgtgttcaatctgccctacatcaaattagctgtggtttgacatcttcctttcctccgagatgacaatcacctatcttctccatccattatcctcttaattatgtctgagattcaggtgaaaagtcttctggtttaccaccagtgtcagggctcagtgtgtggtttgcccttgactcctttccatgcttggctccacatgctggggttgttctctggccctcagacatggccataggcctcgcctaccagtgctttacagatgagggtttgggagctactgagagtaccatatcaaaaaaggaccacattcctattagggttctagcctcatatatactggtatgttttcttagtttcaactgctgtcactattatcaaccttaaaatactgaaacaattatcttgttcctctagtgagagtgtgggatgcttactattcgacattttcagcatctatcctataaatggctggcaccaagacactgtacatcgattgctttaaaaattgacagagtagggagagagcctctttttatgattgtgttataaatccctggccttgactatctctgacataaaatggatcggtgattcctttcgtaattgtgacatcaacaaacaatctaattctgttttaattctccttttgttgagcatctcacacaagcaccctgcacacttagttccttttctcctgcagacaactgtagggttcattgtatatagtacagatgttgattaaaaaagagaaaggcataacttgaccagttagtttctaaaagatatcaatagctaataagtggacctaagataatcagctgaaaaattatttgaaataataagagaatgcagtcagcttctaaaattaaaacaaaatgtaataacgttcctatatgcaaaacataaccaattaggaaattaatggaaggaaagatcctgtttataataccaatgacaacagcaaatggaaggaaggaataatttaacaaaaattatgaagagtgtatcctaaatgatttttaaaagattcaaataattggaaagatataccttatgtaaagttagcaattttccttaagttaattgataaatttaatgagatcccaataaaaaacccaatagggttttctgggatttgggcaagaactagattagctattctaagtttccagtgaaaaaaaatcatatgacaattgccaggaaaattctaaagaagaagtataatgaaaaaagattaactgaccaacatattaaagtgaaacacaaatacagaaatcaaaacaatgtggaaaagacagaacattgaacaggatagaatatggaaacagacccaaaaacaaattcagattttaagacccaaatacatatttcaactcctaggacacaagtataaatacaaaatgggctgggcacggtggctcacgcctgtaatcctagcactttgggaggccaaggtgggcagatcacttgaagtcaggagttcgagaccagcctggccaacatggtaaatgttaaattttttaaaaaaaggaagctaaagaaacttgaaaagacaaataaccattaaaaatttatcttggaatgaggaattattttctaaataaaacataaaaccctgaagccataaaggaaaagattgatatacattacttttattcataaaaagtaaaagtttctttatagatcaaaatactgtatgcaaaatcaaaggcaaatgacaagctgaggaaaaatatctgtaatacatatgaccaaaaaaggtatgtttacttactatatgagagagctcttatgaataggagatgattaacaacccaaaagaaaaatgaacaatgggccgggcgcggcggctcacgccttaatcccagcaatttgggaggccgaggcgggcggatcacgaggtcagcagatcgagaccatcctgtctaacacggtgaaaccccgtctctactaaaaatacaaaaaattagccaggcgtggtggcgggtgcctgtagtcccagctacttgagaggctgaggcaggagaatggcgtgaacccgggaggcggagcttgcagtgaaccaagatagcgccactgcactccagcctgggagacagagcgagactccgtcaaaaaaaaaaaaaaaaaaagtaaagaaaaatgaacaatgactatgaataggcaatttacagaaaagagaaataagtggccaataaatgtgtgaaaagatggtagaccttatttagttaggaaaatgccaattaaagcagcagtgaggctggcaaagatgaaacatgttgttgatacacgatgttgccaaggtaatggagaagcaggcaccatcacacacagctagtagtagagtctgcataaccctggtagaaggcaatttgcccacgtccattcaaattataggtgcacataccctgcgactcagcaatttgacatccaggagtgtgttcacaaacaaatccacacatcatacaattctgtacatgtaaagataatcattgctgcattgtttcttataggaaagactgaacataagctaaaaaaatccaccaataagggattcaataaattattgtccattctgtggaatattgcagatatgttaaaataatgagttacatctgaatgtgctaatctggaaggattatcacttctgtactttaagttaaaaaggcataaatatagtccatagtttgctaccattagttttttaatttaatgttttatctatttatttattttttatttttagagacagggtctcactatgttgcccaggctggtctcgaactcctgagctcaagtgatctgccctgcccaccttggcctcccaaagtgctgggattacaggtgtgagcaacagcacccagccccttctgtgtttttaataaaaagaaaaagttacatatatgcataagtataaatgcaaactttttcaaatagattataaaaaattgttaatgatatttatttctgaaaagtaggactaaagatctaaagcaagagggagatacttggcattctttaccttttatacagtttgggattttttatcacatgcttttatctttataatatagatatcaaaattctcagcattgatcattaccacacatgcattaggaggatttcttttctaattttgacatcaaacattgaataatcttccatcacgacatggaagagtattcaatcttgacgttatcttttgaacatcatacataaatatctcagcccttgggagaaccaactgtaagttgggatttgagtgactctaaggtccacagtactatatgataaaagatggcaaatccgtttcctttgtgtagccatcttggttggttggtcatggctatctggtgccgtacagctggaaggatttcaagtcaaagaccaggatcagtggaaaagagagctgaggtcaattaagaagctttattcatgaaaaggctaaaatcagtggagttgccgggagcagtggcaaatagcagtgttagccctgagccgagctgttgacaagtcatatctggcctggtggatggagctgaaagcaagtgagagtaacagccaagtttgaaagcttgagatttaggtactgtcttagatggaagtgggccaggtgcttgcctggggctgcctcctgaaggagtctcacaccagtataagaaaaaagagaggtttacaggctccagggatgtgctttgtcatatatgacagaaaagtcatgagtataaattatgcattaaatgaagctttgagctaacactgtgagaaatacggtatttacaattggagaaaaattgagtaatggaggaaaagatgtttgggtagcactattgttcttggccttctgaggaggcagagaaggatgcttacggtcctatttcactcctggaattcttttgctctctctgggagaccatgccataatgtttgttggcacagataagtcacaggtcaggaatgttcaggctagttccacccttaaaaagttcaatgtagaatcagtgaaccatctatggaaagagatgcgacccttctgtctccattgctatgaatttcttttaagaaaaaaccatgttaattgaacaaacgactatgtattaaccactgtgcctcaagtgctctccctgcagcatctcatttaatctgcataaaagctgtattttataattccttgcattaagtaacttgatggagatgacacagcttgtgactaggtctgtctgacgtcagaacccattttcctaaccattaagttttactgcctctttcttcaaactctgatgaagatgtattcatcttccctaacctatattttccttgaatctctacatgaattaatttttttgtcttttaagcaatatcctccaaaatctacactgtcccccagccatcatcaggcgtgatcaagaaagtaaagacatgtttactttcaatacagtatatccattgtacaattgatatcatatatgtcatatatatcatgatatcaacatatatagataggtactatatatagatagatacaattggtatatcaaatgatacaatatgtcaattgaaatcttttttgagaagtctgtgtagcaataaatgttaacatctttcacaggaattacctttgacacaacagagtttgaagaaaaaataatttacaaagatgcttagttcatcattatctgtgaatagtaaataccttaacaatgctataaaacttgacagggggcttacaacagaagatgaagcatattatgatacattcatacaataaaaaaatgtatgctggtactaaaaatgattatgtagatctgtatttatcagcatagaaagatgtcagtgatacagcattaagtgaaaaaggcaaattacaaagagcatgcagagtataaccctttcacgtaaaatttgtgggttttgggcatggtcgcatgcataaagagatatccggaaggatattctccaaaatgctaatagcagttatgagtggttgagtttgggtagttcatcttattcttggtacttttctctcttttttattataatgaatgtgtgccattttaaaaatcagaattttaaaaattaggctattttcatttggggagggaaaacacatcaaggaaatccaccacccctaactgcttgtcttaccgatgacgggtcggcatggctaagtttgggaggcatattggaaattgggagtccagctccatgctggtgttgatgctgtaaagaacgactgtttgggaggccaaggtgggcagatcatgaggtcaggagactgagaccatcctggccaacacagtgaaaccctgtctctactaaaaatgcaaaaaattagccaggcgtggtggcgggcgcctgtagtcccagctactcgggaggatgaggcaggagaacggcatgaacctgggaggcggagcttgcagtgagctgagatcacaccactgcactccagccaaggcaacagagtgagactccgtctcaaaaaaaaaaaaaaaaaaagaatgactgtctgtctacataggatgatggtcctaggtcacaaactgacagctgcctgttcagcagatgtcttgatggagctattctcagcagcacccagacttccttctcttgagcagaatgggagtctccccagagtgcccttgtgcaagcttctcagaggttttcttactcccctcttttgaacttagtctagtcccctgcttcctaggaggggtgggttgggtccacagtataaaggccccttcagattgtgggatatctgtagagggttccactacgggttcacatgatggcttgtggagggaataacaatcataatagtcatactaccttgttgataaaatttcagaattaagtgggaactcagagatcttctagggtgacttgccacatttccaatgaggaaactgaggacgcccaagaacccaaacctcttgccttcccaccagtctgcttttgtttcatgccactttgctgaacagagctttactaggcaggtgtttacataaggcctattgcaaaggtgggccaagaagcaggccattaaccagaacacttgaactgcctagacactcatcagctccagaacatacggctatacatgagaccagaaagagagtgagtccaaacttgacaggggctgaagtgtaaatgtttctttgtttaaagagattttaaagttgtaatccaaaattagaaagggcagtgacatattggggaaaatatttgcatcaaattaaagaaatgaaggtttaatatttatgctacagaaagaaactcttataaagcaaaacatcaggactccaatagacaagtgggcagaggcaatgaacagaaagcttacataatatttttcctaccaaaatgaaaataccctaatttcctattctgattatgaaaacgatacacactaaggcagggtttctcaaccccagtggaactgatacttcgagtccgataattctttgttgttggggattgtcctgtgccttgtaaaatgtaaaatttacccacaagatgccagtagaacaccccctcaccctgcttagtttgataaccaaaaatatttccagaacttgctaaatgtccctggaaaggcaaaatcagtcctagttgagaacgctacactaaggagaaagacacatggaaagttgttctttctccttaatacttgacaacctgtaacattaacatgaaattaagaagccttcatcaagctaattggcaacaagtaaattatttaaaattataacacctaaatgccagtgaggttgtagtgaaatggatagaagcattcgctagtggtgacattatatacttgatatgaccccttttcagtaatacttctcaggactgggaagattgaatgcctcctttgcctcattcatttcattcctaggaatttctccaaggaaatcactgaacagagacaaaacccagtgtgcatcacgatgttcatctcagcattatttttaatagtgacaatttgatagcaaccaagatgtccagcattagaagaccactttaagtaaattgtggataatcaatttgatgatgcagtcattaaaaattatgttgactatgtagatgtgacaaagttatgacagaaagcaaaatacaaattgtatgtgtactatgattgaaattttgtaaaaataagtatgcatgtttgttcaaaaggatgagatggccaagtgggatggttcatgcctgtaatcccaatacatacggaggccaaggcaggaggatgacttgagaccaagctgggcaacagagtgagatcctgtctctacaaaatataaaaataaaaataaaaataattagccaggcgtggtagcttgcacccagctactttagaggctgaggtgggaagatcacttgagcccaggaggttgaggctgcagtgagccctgattacatcactgcactctggactgggtaatagagtgagaccctgtgtcaacaaaaaggatgagatctcaatatgtgtaaatgaaaacagctgtattaagggactaggatcatgggcgtttttaacttttaaaaaatatctttaatgtagttatactgtatttttttatttttaaagaaacagaagaaaatggccaaatagagagctgaaggaactctggaggacatcaagtacaaagagacaatattactgagctcgaatttggggatcaggttttggtaggagaccttataatttataccccaaataggaatacttcgagagtggaagatggaacttgtaaatattacaccaggaaaacaggtgtcccagtaaatgtctggtcaccctagacagggaaaccaagaaagatgacatgaagctcttatgaaaactcagaagtgataaagttcagagtcaagtagaggggactggattcctatgaccaaaatgtgatttcctgcaactgaggaccctgtaactaaaaaagggtactcagctggcataagaatatgtcttatcattaagagagtaggatgacacagaaaattataaagcaaaggccatattatcagtactagagctgagatcagcggaagtgattcatctactcaacaaatatttatcagccaggaacagttcgttctaggcactgagaatattgcagggacaggacagacagagtctctgatttcacgaaccttacagtcagttggaagtcaggctggaaaacaaataaacacactaatcacatgacatgtaaagtgcttcaaagaagatgaaatcatgcaatgtggaaagtgtctaagggacgggattggggcagcgatcaggggaggccttcctgaggccctggaatttgagatcaaaggtgaatcaaagaggagactggaaagatctggggagagggtgatctcagcctagagagccttgaggccaagctgcgaggccaggcaaaggtcagaaaggtgcttggtaaggtggagaccaagttcaagaccataagggagtgaggaggaactcagtaataatggcaattgtagggctgagcacagtggctcacacctgtaatcccagcactttgggaggccgagttggttggatcatttgaggccaggagttcgagaccagcctgagcaacacagtgaaaccccatctctacaaaaaaaaattttttttaaatatccaggcatgcacctatggtcccacctacttgggaggctgaggcgggagatttgcttaagtccaagaggtcgaggttgcagtgagttgtgatagcaccactgcactccagcctgggcaacagggcaagatcctgtctttaaaataaaataaaataaaataaaataaaataaaataaaataaaataaaataaaataaaataaaggcaattgtgctgctaggagcaggaactggatggggcatgtggtggggacccaactaattcaaaccctgcctgggggatttctctgaacctaaactctgatcataagttgagaagcaatagcacctcactaggctgtttgaccgtttaattgagagggcaaatgtaagaacaaagcaatattgtcattttttttttacactgttcctttgtttaatgcagacagcctgcccttttcctagaaatcaatcagatatattatcctacatgaacacacacgttcttctttctggttgcttataaactctttaaggatatcagtagtttcaggggcttggcctttcacaactaggcaagtctcctttgttgggtatgaatggagagagggtcaaatttgaactagggaaatggcacgacgaagttcttaaagtggttgtaattctgccactcccacgctgttggttcagtttggggaataaacagaggtttgacctaggccttttgaaaaaatgaatctcttggattcatttggaagtatcccagatttacaaagtagaagctattaaagtgtttgagtggtggttaatcactctctaggaattctcatggacatcacagatttactcagctgacccttcttcataggcacatctcagattttggaaaattattccagattataagttggcagtcaagcaacgtgatttgatcgaacacttactctatggcaggcactgtccttgtcactgagaacaaaacagtgaagacaataatagctcctgccctcacagagctcaacaatgtaaatggtaaggaaacgaaacggttaaagttataattaatgaaacacgaatagatccctgagctcttgcctttccattatatgaatgaactgtgctggactatttagaattgtttccaccaatttaagaatataatagtagtgtgcttaaatggacattttgttttagaaatttttttaactagaaatagtctcccaactctttaaattttttaatattatactataaatgataaaataaaatacatatttaataaaatgaaaatatgtaaaaatataaactctttaaggatatcagtagtttcaggggcttggcctttcacaactgggcaagtctcacaaatttaatttgtttgttaacaaacaaatttaataaaatcaaacactatatagttatgttatatttttattattttgagataaggtttcactcttttcccaggctggagtgcagtggtgcgatcatggctgactgcagcctccacctcccaggcacaaatgatcctcccaccttggcctcccaaatagctgggactacaggtgtgtgccactatgcctggttaacttttaaattttttgtaaagattgggtatcactatgttgcccaggctggtctcaaacttccgggctcaaatgaccctcctgccaaagaagcctcccaaagtgctaggattacagcaactgcacctggccttatgttattattaaaaggaatccactatgaacatgattttttgcccatttggctcacttaggaagcatttttaaagtcttgatgcctgcaaccactccagaacaattaaattggaacctctgggggtctggcatccaggaatccagactgtttaaggctctccgggtgctggcagtgtgcacagccagggttgagaatcagaagcagtacatttgcagcctatcaggtctgtacctgaatatgtggagtgagtagaatgtgtggagtgagcagaatgtgtggagtgagtgtggggcaattgtgtgggtaagtacacagatactctgtcacatacagtggcctgatggcttaaaacaaaacaaacggccaggtgcggtggctcacgcctgtaatcccaacactttgggagcccgaggcgggtggatcacgaggtcaggagatcgagaccatcctggctaacacggtgaaaccctgtctctactaaaaatacaaaaaattagccgggcatggtggcgggtgcccgtagtcccagctactagggaggctgaggcaggagaatggcatgaacccgggaggcggagcttgcaatgagccgagatcgtgccactgcactccagcctgggcgacagagcgagacacggtctcaaaaaacaaacaaacaaacaaacaaactattcaaacccttgctttgatggcagttattatttgttttgttgtttggttttgaacattgataatcttgctagtggtaacctttgtaactcgaagcatcagtatcagccaagattgcatgcattcagagacaagtgagagaccagccatcaaatgaggaatcaacaaatcatggcctacttttctcatgtaacaagaagttcaaaagtggagagaccaggctacagcaaggaagaaccaagctccttctctctaagcagccatcctcagtatgaggctttcattctctaggctgtgagatgggtgccgagcctctcggcatcagtctatgttgaaggaaggaagcctttgtccttatgagcaggctgtgcctttttggtaggaagggaagctctgccttcacctccctcccgcccatcaggtacttctgcttacgtatctttggtcagaattctgtcacatggctacccctagctacaaggtaaggtaagctggaatttttttttttttttttttttttttttagcaattcttttcccagtctttctagaggaaggcaaggcagaaggggtttgggatggacgctgaatgaaccaaactatagtttttttcacatttgagggcaatgaaatcatagtcttgaaaaccaaggaccaggcgatagccttttcaccctgtgactagacaggtccctgagggcacggctgatgtggccaatcttctgtaaatgcaaaggtgcttatggccctagagcttcagctctaagacatgaaagtgaaggttcctccagaatcacacacgtgcattattcagcgcaaagatctgtggtttggtgattcttcttctcctttcataaggtgagaggcagcagttggggtgaatttccccaggaatggtgggagatgtgggcctagatcctcccgctgcttgggaagagtcgtacttttcagttggaagcctgctccaggaatggcgggctccaccctctgcatgtgacgtacaggggctggtaactgatggagcctgaacatatatctgggtgtgagggataagcttcgaacgccacttaagtgtaggtgggagccaaaaggtcaccctgccaatacatgattacatgtcctgttgaggagaaaatacacagggactattttcacccttctggaaattgtgattagaaaatgcaaggagaaggccaagacactaaactggagctggtagggaggaagcctcagccctgctcagggtgcctggacagtccccaccagggcccagctaggaaatgccagccttgtccttggtctttgtccctaatggctcccggcgggtgagggaactgcctggggattccccatcgttgaagcgctctgtgagtgaccccctcctaagcccctccagtaggggatttcccagaatgttcccacgcccccaggaagcctcttccttagccacccccaagctgcttgcggttcatggtagaggtaggtggcatcaaatgaccccacaggtgagggatttgcctgaggtgggaaaagagggaagataaaattggaaagccaccggggctgaggaattatctcataggagagaactgtcaaacagtataacgtttaaacagactttaaaggcaagaaaggatggagggcacagactctgaagccagagtgcctcaattcaagtaccggtgctgcaacttccaagctgcgtgatcttgagccagtgacttaacttctctgttcctctgtttttcctcttctgtaaaacggagataatattttctaccacacaagtttgttgaaaatatcaaatgtaatgataaccataaaatacttaaaagagtgattggcacacggaagtattcaataaatgttagttattggccaggcatggatgattcacgcctgaaatcccagaactttgggaggctgaggcaggcggatcacttgcggtcagaagttcaaaaccagcctggccaacatggtgaaaccccgtctctactagaaatacaaaaagttagccaagtgtattggcgggcacctgtaaccccagctacccagaaggctgaggtggggagaattgcttgaaccagggaggcagaggttgcggtgagctgagattgcaccactgcactcccagtctgggcaacagagagagactctgtctcaaaaattaaataaacaaataaatgatagttaagttaacctaggctatttttttaaaaaaattttggtttctatccacctttttcgtataaattgagccaggttacaccttagacctattagatcagaatcaggcatcaggattgctaaagctccccaggggaccccagtgtgtggatgaggttgagaatcattgttttggtccagtctttccattttaaagtgaggcaactggagctgaatagggaaatcgagtcactgaggatcacccagccaggaccagggcccaagttcctattcccatttaccgctgatggagctcaccgtggtcatgagttcaggacctggctctgtgtctggaggaaggtctggcctcgagtcagcccttgtccagaatatctggccaggtgaccccctctccatgcagcccaggaggcagatggtcagctctatgattggaagaatgtgagtgactcagggatcttgtgttgtgttgtgttgtgtgtgggtcaccaaaaccgagacccagctttctcctgggagacaacagggtagccaaggacttatttttttgttttgttttgttttgttttttgagacagagtcttgctcggttgcccaggctgaactacaatggtaaaatcttggctcactgcaacttctgcctcccaggttcaagtgattctcctgcctcagcctccggagttgctgggactacaggcatgcgccaccacgcccggctaatttttgtattttttgtagagacagggcttcaccatgctggccaggctggtcttgaattcctgacctcaagtgatctgcccacctcagcctcccaaagtgctgggattacaggcgtgagccacagcacctggccaactttctagtgttctcgggagacctttgcccactcaagtctccagtctctcgggggaagcagtcagtgtgagagaaggaacacagggccccgagccaagccctgctctgcgcctccctcgcgggcaatgagtctttgcatcaaacactcaaagtttctgaacttctgagaaaacaagtgccttgaggtgaatcctatagcacagctgtcaccagcctgtggtcattttggagggtatgtggcataggtttgtcccagggtctcagttgtcctcatctgtagagtggggataataacagctgaccttccctatcccacacagagcgttattgtgaggagtctgatggacctggatgaattctgaataggagaaagatgggtacatggatgcccaaatgcaggctcacccccacccctctcagtagcagaagacatgcatatgggagaagctgcatttcctcccagcctcactgtgctctaggtgtccagccctcattgttaggggatgtcactgttgtacctctggataaacagctgctctcatgccacctttgccagttgtcccttcagctgggcgagccctttccagggcatgactgccccaaggagggccagaggggactgggcaatagcagggacatggagggacgaggccccagatcagccacttcctcctgcaagggaagtcaaaccctttctctcataagtgtcaggctggctgcacggtccctgggctggcagggcaggtttcttgggggccctagcaggaagcactcttgcttcccaaggtaaagacaagtttcttatcactggcggtggttttctggttagaggcagcaggcagcggttacaaactttgcctagagctctgggatctgcaagccagggagggggaggcagacgacagagctagagtgagctcagcagagcttgcttagggaggaaggacccgctgtcacttcccgaaagctgggccagcctctaggcggggagaaggtcagagtggccctcccttctgcctcggggtttgcccaggctcttcagagcacagaatttacagtaaatgttgtcaccagtggaaactctcagagggggcgaagaaaagggctagaggaaggagccaggactcccggcccccagttcccgtcttaccaacaccccctagtctcatcgtgttgcttgatcttacctttcggtaaagaggggatgccctccttctgggatgtgccaggaaatacccaaatggtaaaatgaatgagccggccacaccttgcagaaggcagggctgtgactccatcatcgtggctcttgataactcctctgccccgttttagaggggcttcctttgtactgaccttggcacactttctagctcagagccccattcaagaaatgccaggttgaggctgagcatgcttgtgtctgtccttcacagatgatggaacctggcttgatgagcaaggccatgttggtatatgcttctctgccatttagaaagaccccccccaggatgtggggtttaagatgattgacagtataaccgattaacctcattagcctacagctcatgcacctgatggattcgttagggcaaattttattttattattttattttattttttgagagaggacctcactccatcagtgaggctggagtgcagtggcatgatcatggctcactgcagcctccaacccctggtgctccatagctaattttcttttatttttattattgtagatactgggtctcaataatgttgcacaggctggtcttaaactcctgggctctcaggaggtagaggttgcagtgagctgagatcgcaccattgtactccagcctgggagacagagcaagactgtctcaaaaaaaaaaacccaaaaaaccaaaaaactgctgggctcaagcgatcctctcacctcggcctcccaaagtgctgggattataggtgtgagccactgcacccagcctatttagggcaaattttaaatgtcaagttatcttacatctgctcaccacccaccctatttttgagttaccttcttcattccagcagatgatgtcataagtctgtcagtcaacaaacatctgagttcatactatgtgccaggcattgagccaggcattaacaaataggcatttaataagtgcttgaataattaaaacaaatttaaaataatatttaactagtgctttccaacttgcctgatcattagaatgacctgtggcactagttaaaaatccaaatttcactccctagtagtctagtggctaggatttaaaaaaaaaattattattatttttttaattcagctctgcagccaggcatggtggctcacgcctgtaatcccagcactttgggagaccaaggtgggcagatcccctgaggtcaggagttcaagaccagcctggccaacatggtgaaaccccgtctctactaaaaatacaaaaactagccaggcgtggtggtgcctgcctgtaatcccagcaactcgggaggttgaggcaggagaactgcttgaacctgggaggcagaggttgcagtgagccaagatcacactactgcactccagcctggaggacagagtgagactgtctcaggaaaaaaaaaaaaaaaaaaaaaattcagatctgcagacttcactccgcaaatcccaaaaccactgattcacattcctagattttaggatgggcctgaaattctattcttaacaagccttcaaattaattctcatgatatggcaagtttgggaaatactgacctaatccaaatagatttagaaaggtaagacctggtctccaaatatcaggttgccttttgaactgaaattttttttttttttttttttttgcatctccaatgatatttgcctttcctctgtggttaccaatgcttagcagagaaagtctgtttggttgagtcgaataatgtaaaccttaaaattataccggaattgcgatctcctgggctttctgaggatgggattgcttttccataattgctaattaccagattgcaattgttgattaattaatgatgtgatcagaaatcagcacttcttagcaggcatttttctgattagcatgtatttgatggttcccccaagcaacagggaaaagagtttccagaaaaaagagaagctcacaggcttgggacacccccaaaataccgtcagaatgctttctggtaggccggacagggtggaacaaaacgttgtagcagactttgaccatttagtatttatttatttcatttttatttttatttttatttttgagatggagtcttgctttgtcacccaggctggagtgcagtggcatgatctcggctcactgcagcctctgcctcctgggtttcagcaattctcttccccgagcctcccgggtagctgggattacaggtgtgcaccaccacgcctggttaatttttttttttttttttttttgtatttttagagacagggtttcaccatgttggccaggctggtctcgaactcctgacttcaggtgatccacccacctccgcctcccaaaatgctaggattataggcatgagccaccgcacctggccccatttactatttataaagaccctgagcattctagaatctgggtgcagtagacaagtatccagtgactttatttgtaagacgaaatgcagacaccgggagcttttggaaaacacgtggcataacacagtggaaaagagtgaaactggtgtaagacgttctcacaaacgaccttccatttccttaggctctggcctgccagctgctttcccttgctgtattcccgccacctcccacccacacaccctcacagagacccctacatgcatacacgcagaggaacacactcacacacacccctctatcaggttgaaccatatgaaattgcttttttgccgggaggagagatgtagtcttgctgtgttgcccaggctggagtgcagtggctcaatctcggctcactgcaacctctgcctccctggttcaagtaatgcttctgtttcagcctcctgagtagctgggactacaggcgcactgccacacccagctaatttctgtttttgtattttagtagagacagggttttgccacgttgcccaggctggtctcaaactccccacctcaggcaatccgcccgcctcggcctcctaaagggctaggattacaggggtaagccaccgcgcccggcctgaaattgctattcttataggtcacaacagacaaatatcagcagcttcacgtggttcagcctcatatctatgtgtatacatgcacacccacccatgtgcttacgtaaacgcgcccatacacacctacaaacatatatacacttgtgcacacattcacacgtgcaggaaaattctctggtgcccttctccatggctgtgctagtgaacaactaatctggcccctcctgtgtccctccgcaccccacccaccttgcctccttcctagacactaacctccggtgctgatccccacccctacaggagagcgaagacctggagaaacagaacgcggctctacgcaaggagatcaagcagctcacagaggaactgaagtacttcacgtcggtgctgaacagccacgagcccctgtgctcggtgctggccgccagcacgccctcgccccccgaggtggtgtacagcgcccacgcattccaccaacctcatgtcagctccccgcgcttccagccctgagcttccgatgcggggagagcagagcctcgggaggggcacacagactgtggcagagctgcgcccatcccgcagaggcccctgtccacctggagacccggagacagaggcctggacaaggagtgaacacgggaactgtcacgactggaagggcgtgaggcctcccagcagtgccgcagcgtttcgaggggcgtgtgctggaccccaccactgtgggttgcaggcccaatgcagaagagtattaagaaagatgctcaagtcccatggcacagagcaaggcgggcagggaacggttatttttctaaataaatgctttaaaagaaaccagtctgacaaggcagtttctctctttcaccctgtcccttgacactctaaattctgcgatgttgggaccttctttgttttttggactctagtaccctcaaagagctctagggactccactaacagctcctcttttccatggtttattgatgtacttgggaagctttcaattccttctctaggtgtctccttctccttctccttctcctcctcctcctcctcctttctcctcctcctcctcttctcccccttctcctcctcctcctccttcttcttgacagaatttctcagatcttggctcaggctggagtgcagtggtacgatctccgctcactgcaacctccgactcccaggttcaagagaccctcttgcttcagcctccctagcagctgagactacaggcacgcaccactatgcccagctaatttttttatttttagtagagacaaggtttcaccatgttggtcaggctggtctcgaactcctggcctgaagtgatccacccgcctgggcctccaaagtgctgggattacaggcatgagtcaccatgcccagcctaggtgtcttctggattgccctcccatgctcccctcacggtgacctcccaccttccattcttcactgctttctagaccatgagcaggttgtcccctagtccgggagaaggcccagtgcaggatggcctcacctggtgaggtggtaagtcaggttgaccttctcgtctcccactcatgactccactcacccagccaactggctccatcctgacagccaagtctccggatgctgcaaccaggccctgtgccaggctgcccttcacatggaaggcggtgtcttcctaatgctctcaaggggcaacatgcagcttgggtccacagggacttctctgccagtggtgtacgtgtcctgctgaagactccacctcccttagaaggcggtgatacagagcacaggacttgtcctgtccccgcagggctccgcaggctgccatttgagcactttgagggctcagggaacacagggtcatcttcagtttggcagagcctgaaaccagcatgctccacccccctgctcttcagagatccccaggccaagtgcctgctggcctgcctgacacagccttacccacaccactgcccacgagcaaagcctgcagcagggcctggccacacacaacccctgctgagccagctggagacaaaagcaacggagatcattgtgccaggcgcccacctgattgagctccttcagtagccaccctcagtctcatccatttgtcctttagagggacagcctctgcctgctgcctccccggtggcatccctcatggggtgacagaagggaggagaagtcctgcttccctgtgtcagtgccccctgaacccgctggccaaccactctggccggtttgaggccaagtttcaactctagacctcccctgtgtgtgtctctcctgcccctctcagatgatgccagtgttgggctattgtgattattaaatgccatagaagtttggatgagctgcatcccagcaggtggtggggtcacagccccttgggaggagtccaacccaacagcctctgatggcacattgcaatctttggggctctcaccagagaagctggtgcccatgggagcctaggatgtggacactgggctgagccccgtaattcagagcctgggaagacagcccagaagaccttccctgagtgctggcatttctcccagcacagaatcttgcattgtaacctttggtctcccaacgaaacgtggcaaaacaggctcccctttcagtgcagagcctccatgtggactgggcagatgtgtcatgaggaggagctttcttaatttccttcagaacctggattttggtagctaacgctctgtctagctctttcccacccctctgttaacgagaagagcaaagaagccgatcttcacttcagatgttgcagtcataaaatataattcatttttctttcataattattattttttctttttttgagacacggtctcactctgtcacccaggctggagtgcagtggtgcaatcatggctcactgcagccttgactacccacactcaagcgatcctcccacctcagcttcccaaggtgttgggattacaggcatgagccattgcacctggccttctttcacgatctaaagacgtagaactttgagtccagctttctttgctactatctctgccagggcctggcctcttgtgggcaggctttctttgaatcagagattttcatctccacccatgctctagcactgtgattttccccagaaacccccacagaaggcacatgacttctgccggcatcttctgaatgacattcagggccagaactagaaaagcagagttcacgtgcacggttcccatctctcagcaaggacttctcttcccctttcattctctactttctactgaccccaggcagttccacttctcctgtctagtcagcccggtagaggtagcaggtagctgagcctggagctggtgccaaggctgacttcatgtccatgcaggcaaattggagaggcagccatgaatagaaatttgaacatccgtagctttaaccttggatgtttcaccaaccaggttctgtcccagccttctacccatgacagggatggctccctcaggctggtgggccacttgacccacactcaaacgccttctacccaggcaggcactgtgaaagcatgggacccactggatgtagggcaattgggagtggtggagaatgtggcaaactaaggagagtgtgcagctgtctgtcgttcagttctctcccatggtgccatgtgggaatttaggcctgggcttgccatgtcttccagtttgtcaagaaaagccaaaatcagaatttctacatgaaatctctcaattctttttttcttcccttccctttcttcctccctccctccctccttccttcccttcctccctccctccttccctccctcccttccttctttctttttttctttctttcttccttccttcctttttttcctttcttattcctttcttcctttctttcctcctttcttttttctttctttctttctttctttctttctttctttctttctctctttctctcttcttttcttcttttctttctttcttttctgacaaggtctcactctgtggcccaggctggagtgcagagctgctgtcatagctcactgcagcctcgacctcctgggctcaagcaatccttccacctcagcctcccaagtagctgggactacaggggcatgccaccacacccagctatttttttatttttgtttttttcatttttctgtagcgaggggatctcattatattgcccagactgatcttgaactcttggcctcaagccatcctctcatttcagcctcccaaaatgttgggattacaggcatgagccaccacatccagcccatgtgtctaaataaaatacttaaaacattataaatcaagcttacaagttgttaacaaaacacattcttttcttcttccttgacaaggatactttcatcacaacctaaaaggccaagtttgaactcagaattcttagacacttcaaaattttatattagcacaaggtagtgagaaagaagcagtacccggactgcagcttgccgctttcttgccctcccctggttcttcctgtaccacagcagcctccagttcatgccggcggacatgccagcctggaagaccaaattccgtccacattcacccccacaggacccatcccttgggtccagagatgcacataccagtggtctggtccacactcgggaagaagtatccagggaagaggcttcagctcctggaagccagcccagggccagttactaaggggattctggtgtccttggaatgttgggcacagtctaaagggggacacagggttctaggtaggtgtctccttagttctaaggactttttgccccaacaagaggagcgtagcaggaggaatggcagtgctagtccctgcattgtcgggagttcagagcagagacgtcttttgtccaggtctgaaggtggcactgcagagacctgcccatttgcaactctgatctaggtcagcaatatctcctggaaaagcccaggctacaggaaggccctgtgtagcaagaaatggacacaagacagcgtcgtcaacatctgtcacattgaaatgcgggttcctggagaatgttagtttccccacctgccatcctctgcatttatctcttactagcagtgtcattccctgagtgagtgtcagagcaaattacgagaaagccagatcttcagtcctcaggatgagaagtgtgggtggggagagaaagggaggcaaagtcaactcaaaggtcacgaagttgccgtctgctggaccaaaacttaccagcagtttattaatacctccagccgatgttacagttgtggctttacggggaaggaggtgagactactggatgccccacttctcttggggacagataggctatctctatttctcttccttcttccccacgggttcagtgctccaaagctgcttgggaattccaagggggagaaagggctagtgaactaagatcaacaccaacgtagtaaagatttaatactcttgtttctgccagaggagactgtcattttaagagacacctaggagctcaaggctatagtgagctatgattgcatcactgcactccaacctgggcaacaaagcgagatgcaaaaccctgtctctaaaacaaaaaagagagatgcctagagaaagtaacacttgacccaaaggaaagagtttttatggtagcattttaggctttgtagcaagtgagcagaggagatatttaatggaattcttgccatgggaatgacatgtgactgcattggcctcatgtagataccagaggagtgggagatggggatgggagggaaagagagatgtagcccttctaaaactcttgtgggtttgtgtgtgtgtgtgtgtgtgtgttttttttttgactgagtcccactctgttgcccaagctggagtgcagtggtgcgatctcggctcactgcaacctccaccgcccggattcaagcaattctcctgtctcagcctcctgagttgctgggattacaagcatgcgccaccacgcccagataattttttttttttttttttttttttttttttgtggagatggtgtttcaccatattggttaggctggtcttgaaaaatcttgttttttaaccacctgatatgtgatttaatttaatcacttataggaagataaaataaaaacctgatcctggtttgaacaatctactggtaggtagagatgaagagcccccttttagaggacttcaataggaaaatttgcacaaatacctttgctacccaggaggtttctttggcttcctctggaagattcctgtagacagattgctgagtttgtcattacacctagaaaccaaggctaggaggggtagctgagactgataattgccctcccaaagctattcttccatttttccttactacggaactcttgttttgtctaagatggcaatatgcctagagaaaagattacatatcccagattcctttgatgtttgggatggccatatggcacagttctggccaaagagatatgcaagaatttgctaggtaagacttttatgggaaagctcttcaaaaggtggggctgtctcagttggcacatgcctttctcctcctttctgtctggaaggcagatatggtgttagaggtgaagcaaccgtgtacacaaaggaggaagagattctgcgtccctggtaatactgcagaagtgtgaagatgatagaagctccagctggcccacctctagacggcttctaagtgaaagtggaaaagagtttatttggttacatcaccttgagttgggttttctaagtgcagcttaactcaattctgtctaatgcaggagccaatggaacaaccaaataaggaatttaaacaattcccctagctcagtggttcctaactgggggtgatcctccccattccccaagatatttgacaatgtctggagatatttttagttgttacagcttgggagagaggtactagtaacatctagtgggaagaggccagaaatgttgttgctaagcatgctgcaatgcacagggcacaccccacaaacaataatccagcccaaaacatcagtagtacagaggtggagcacccctgcagctggccctagtgcttctagggcaccagcccatcaggccaccaacctaccctgacacgcttgtccatccctctctcagaaacaaaccctgtgtattgaccaggctgaaaaagccacgtccttcaccgtatctggcactttcctctctctaagcctttgctcatgcatcatttcctctgcctagaatctccctctcatcttttcaggtggggaccatgactcttcattttttttttttttttttttgagatggagtcttgctcttgtcacccaggctgcagtgccgtgacgcaatcttggctctcggctcactgcaacctacacttcacaggttcaagtaattctcctgcctcagtctcctgagtagttgggactacaggtgtctgccaccacacccagctttgctttgtgttgggaacattcaaaatcctctcttctagctatttgaaaacatacaataagttattgttaactgtagtcacccatcagtgctaagacactaggacttattcctctcatttagctgtaatttggtattctttaaccatcctctcattatttcgccctcatctctgccctgcctttccagcctctagtaaccactattccacactttacttctatgagttcaacttctttagcttctgcatgtgagtgagaacatgtggtgtttatctttctgtgtctggcttatttcacttaacataatgtcctccaggctcatctatgttgctgcaaatgacaggatttcattcttttttatggctaaataatatcgcattgtgtatatgtaccacattttatctgttcatctgttggtggatgcttgggttgattccatatagtactttgcattgttgctttttaatgtgcatagaagataaggaatacaggagtaaaagagtttggaggcaaaaactcaaactgtgtttttcctctgctctcacaccactctgcaatcaacacagatgacttctgtgaccaaatgtggggagttttccccatacaccgagcaagcaatcagttctgcagcagacaccagctgagtatcctccaattcagttctgaccctgtctgcctggagatagcatcagctcctacaggttgagagctcaatcccacaagactccaaccaacttcagatgccagtcgcaagtccaggcatccagaacttctggccactggcttcaagttaggttcccacgaccctctctttggattggacaaatgtgctagaatggctcaaagaactcagggaaacacttacatttactggcttattataaaggatattgcaagggatacggatgagatgcatagggtgaggtacgggggaggggtgcagagcttccattccctccttgggtgtgtcatcctccaggaatcttcttgtgttcagctattcagaaactccccaaaccatgtcctcttgagctttttatggagacttcattggagagccatgattgacaatcatgtagaaatgcaactggacaaaaagggtccaattacatgatctagtatgagtcacatgatctaatactaacaggctaagcagagaaacccagcaagacctgtctgtgcagattctttttggcctctctgtgtagcattccttccttcagggtatgcagcaggactgcttctgaagtgagggtcttatgaccacaatcagaaaaggggaggaagattagggtcctgctttgcactagggaaagaagggcagagaaaagtcagagataaattttgttttttaaggcctgcctctgaggactgaagtgcccaacattattaaaaaaaaaaaaaaagactgtaacaaggtgttatatcacagagataaataagacctctgtgttatccaaacccaagattggctgtactcttcttttgcttaaaaaacatatatatttaaattaataaagcttggcaaatatagagtatagacactgaagtttggaggcctacaagcattcatgaaatttcatcttttcattttctcaataaagcatctctctcaatccatttgtgttgctataagaaaatacctgagattgggcaatttatacataaaaaagatttatttggctctatggttctgctgtctggaaaaaatcgggcacccggtgagggcctcagggtgcttccacttgtggtggaggtgaaggggagcatgtgtgtgcagagatcacacagtgagagaggaagcaagaaagagcaagatggaaggggctgggctctttttaacaatcaactcttgtgggaactaatagagtgagaactcactcaacccccaccccagggagaacattaatctattcatgaggggtctaccccatgatcaaaactcctcccattagcatcccacctctgagtttgggatcaaatttcaacatgaggtttggtggggtaaacatccaagctatagcagcatccatgtgtggaaagttaagagcatctttttttttttttttttttgagacatggtcttgttctgtcacccaagctaaagtgcatggctcactgcagcctcaaactcctgggctcaagcaatcctaccacctcaacctcctgaatagctgggactaccagtgagtgccaccatgcctggctaattttgtgtgtgtgtgtgtgtgtgtgtgtgtgtgtgtgttttcaatagagatagggtttcaccatgttgctcagtcttgtcttgaactcctggactcaagtgatccacctgccttggcctcccaaagtgctgggattgcaggtgtgagtcactgcacccagccaaaagcatcttatcttctttctctatcttgtggcatgtgaagatactgatactaaactttgccaatcatctttcaacttgcagccatacacataggtacccattcctagggatcagctcttcatatctgggccatgggagctgtgaaattagattgcgagtcacattagcaccacgtcaatcctctccaccccaaccaccattagcacatcttctctaagtgaagtcagcattattcacataaaatgttatccattgactactggtgcacagtgtgattggggtttatgagttactcggggtgattatatgatgaagactcaattcttagtgggggcgctggagaccttgcaccctctgtcccccagctcacttcatatcaccctcttttcctctgcactggcatctgtcccttccccaaatctctgcgtgctccctccagcccaagagccttgctcattctgctcagccctaactgaaatgctcttacccttctagctcattcattcctaccttttgtcaaataccagcttggggaaattttgcttgattcccaggctagatcagaactgcaatttcaaatagtttcatagcacctcatgcccttcctttatacccattaacacagactgaaaatttacatttatctatgtggttatttggttaacatttgtctctgtgactggaccatccattctataatgtcagggattgccaatgttttgctcaccattgtattctcagctccttgcacagtagcaaagagcctaccacagagtagaaattcaataaatattcattggctgaatgaataaatggatggatggatggaacacagtgcctgccttctaggaatgtaaaatccaagccaattattattctgacgatggaatacaaatgacaaaataaatattcagttaacatataaaaagtaagaatcaatcagatattttaagagcaggaatcaagggaaggcatgtattcttgtgaagatg

SEQ ID NO: 47 - DNA, 925 bp, Homo sapiens
caagagagagagagaggtgcaagccccaaagcgagcgacatgtccctttggggagcagtccctctgcaccccagagtgaggaggacgcaggggtcagaggtggctacagggcaggcagaggaggcacctgtagggggtggtgggctggtggcccaggagaagtcaggaagggagcccagctggtgacaagagagcccagaggtgcctggggctgagtgtgagagcccggaagatttcagccatgcctcacagctccgacagcagtgactccagcttcagccgctctcctccccctggcaaacaggactcatctgatgatgtgagaagagttcagaggagggagaaaaatcgtattgccgcccagaagagccgacagaggcagacacagaaggccgacaccctgcacctggagagcgaagacctggagaaacagaacgcggctctacgcaaggagatcaagcagctcacagaggaactgaagtacttcacgtcggtgctgaacagccacgagcccctgtgctcggtgctggccgccagcacgccctcgccccccgaggtggtgtacagcgcccacgcattccaccaacctcatgtcagctccccgcgcttccagccctgagcttccgatgcggggagagcagagcctcgggaggggcacacagactgtggcagagctgcgcccatcccgcagaggcccctgtccacctggagacccggagacagaggcctggacaaggagtgaacacgggaactgtcacgactggaagggcgtgaggcctcccagcagtgccgcagcgtttcgaggggcgtgtgctggaccccaccactgtgggttgcaggcccaatgcagaagagtattaagaaagatgctcaagtcccatggcacagagcaaggcggcagggaacggttatttttctaaataaa

SEQ ID NO: 48 - DNA, 378 bp, Homo sapiens
atgcctcacagctccgacagcagtgactccagcttcagccgctctcctccccctggcaaacaggactcatctgatgatgtgagaagagttcagaggagggagaaaaatcgtattgccgcccagaagagccgacagaggcagacacagaaggccgacaccctgcacctggagagcgaagacctggagaaacagaacgcggctctacgcaaggagatcaagcagctcacagaggaactgaagtacttcacgtcggtgctgaacagccacgagcccctgtgctcggtgctggccgccagcacgccctcgccccccgaggtggtgtacagcgcccacgcattccaccaacctcatgtcagctccccgcgcttccagccctga

SEQ ID NO: 49 - DNA, 37672 bp, Mus musculus
  misc_feature (28188)..(28207): "n" at positions 28188 through 28207 can be any base.
  misc_feature (35262)..(35689): "n" at positions 35262 through 35689 can be any base.
atgctcatcatccttgagggcacacctcccttgcttttgccctctgaatcacagccttgtcctccttcagcatgtcctatctttccatattttacacctctatccaggctggtttttgcaaatttgcctgcctaaaattccagtcgagctgtatcacttgtaaggataaactactaatatatatgccttgcctgttctctttcactcatgaatgaacagtcctcacactcctatccccctaatatctaacagagatgcagctcccaaactctacagcctgaatcccagagcctgagctagcccacgaatgcatccaatccctgtggtgcagaagaacccatgctctgtccaaatcaatcacctaaacggtttagaatttctctgtggtcttctctttccagtgcctaggtctccacccctacctctgactgttttttcttctactagcatcccctgtcatactcttaagatttctcaaccattctagtcgtaacctagcctgttcttttccttcatgtcttatattgaaattctgtgactctgaggttcagaacagaagtcttcttgctggggttgcctatggttctctcaatcatttccactccttccctacttggtactttcccagagaatgataccttttgggcagtgagtgatatatacccagtactaagctgagtcactgtcagcatactcttttaggcaaccctgggtcttggccatgcctcattgccttttcctgtgcctcacaggagatagaataaatcacaggactttggagaacgtcacagtggtccatgcagttgacccttgtagcttgagctttgggtctcagagtgccagagcaagggaagatagagcacaaagatgtggagatgtggagtcacagcaacagtgtcaccaattctagaactatagttgcaagcactacctctgctgaaggcagttgaatacgagacaacatatcattggcctttggagcaatgctcaacaccacccacggcaggacactttgcagagcagggacatggagaagcagagaggtgttcgctggacttgggaaggatgcctcgtagcacaaaagagaaaggaagagtgtatgaagggcaggctggatcttccaacacaagagtaggggcaccagcttacttgtcttttaaaggcctgccagcacagtgagtccacatgccctggaaagtcatgtttcttcttaggttatattgtggcatgctgggatgctttctcctgctgggcagatggaaaagacagtagatggttctccttgtaatttttaagtttcatctgatgttgaattaccccccaccccccaggatgcctgagttctactcaataaaggaggggctaatttaaaacatattaaaagtcaacacattaagtttccaacgttctgtgtagctcattccctctaagcatgcctatctgcaacccagaagaatccattgttttgcatctgaacacactatcagggactacagtgcaccatgactgttctaggtctagcagagtgtatctggtgaagaagtctgctaagaatactcgctgctggccctcaggggcttttcttctgtgtggactggtttcttttatgctcagtggattatatcaaataagaacaatatattctgtaatcacaagtagtcaagcctgtgtacttatgcagaggaaactgcctttggatcatgagtttgtaaagagttgagggagaggcacagtgtttagatcagaaggtgatctccagatgacgttttacatagccctggttagtctgagctgaggaggggccaggtttccttcagtcgtgctgaagacttcaaaggctgggcaaagagacctttataagaagatgcttctcaaggcacatgagagaaatagtacaaggagacccggaaggtagagaaagaggaaaggagaacagactggctcacatgctcagaagtgaggacgactccatctcacaggggagtgcagggcatttctgaacaagtttgtgcaattcatactccttgtggtggctacctgatatgaaacaacaacacattttatataaaataatctaaatcacatgttcctttagagattgccaaaatgttttgtatactgtcgaaaactaaaaattgaatgtccacaacatgacctatgttcatgcctacaactccattagtactttcactcagtctttaacgttttgtatactgtaaaaactgttcctaaaatttgaatgcccccaacatgagctctgcccgtgcccatagcaccattaacactgccactctgtctttccagaattccaaagcttgagacagaatgcctgaggaacatcaaaatgcaaagcttgatgagtacctggccttcctctgtagtagctttaagggagacaaaacaagcaccctttgatggactccataattgttttacttactcttggaccatggaaacaaactacagatggggccatgggaacaaaccacagatggggcctgaaacctcctctgagaagggacaagtggaaaaggagacaccagatgctcgaatatcacattagtttctctgtgaaagaaggtggtcaatgtgggttgcaggtagggcaagggcattggtaattgtgaaccatgaggtataaaaccaaggggacataatacttctaagcctgacttcgtctacttggctgggcttctcaaggaccaagatgagtctgaggagaggaacaaatggaggtagacaaggggatcccatcctggggggtcaaccaagggaggttacatcagcaggccaaagcctagaaacacaggacagtctctaagtgtggggtcaggctgtcctcaatcccaactggtttcattgccatctgggcaagtccaggtgacctccctgatgccaccatatccttttctgaaataagaccatcgtcctgcctcacttccctacctgttcataataagaagtgattgagaaaactgtagtctggtacagtacaacttctctttggagtagcagacatgaagcccattgtctgcaggctgccactgagctgagggctgggctaacctgggattttcctctaccgtgcccagcctggaggagttcagtacttctaacagagttctactcataggtggtttctcatatggtagttcctttgccctctctgactagcctcatgcctgtgtctactgtggagagtatctgccaaaatctcagggaggtgcaatgatctcacccaagtcatatgtcatttgctgacactcactggcttattgcattatggataaaagcacacgagacacgcatgcatcaaaacattgtacagctccccagtagtacacacaattgttatgtgtggggcttttttaatcacctaaaagataagtttaaaatgaaaaacgttgatcccctaatgtgggaaagagcttgtgtctatttgaatgacatgagagctaagactgctttggatcagaaaccacatcctttgcctctctctctgcctcagcagaaccaaagaagctcaagagacccgtttctgtgtgctcacggtcatcagatacaagcaacgaaagttctaatgcaactgtgaaagtttctctttttgtcccttgttgtaggataatctgcattaacaaactgtcaagatgttgaaaaggagatgtgggggagaaggggagtgagacaggacagggaggggaagcaagcaggtgaactctacacagaaaataagaaaggtagaaattccctgcactgcactgccctgtgtggatgcactgtcctgcatggatgcaggagaaacagcccaggtggccctggggatgaagggctcttcctttgcctgcagagggaactgccattcccaggggccctcagctctttctatgatgaaaaggatagtaaggctttccttctgcaagtcaccagtgctcagattatctgcacctctcccatcccatcctctggctgtccagagagcaacaggcagggtcaagggactagatggcctggcttaggctgtgctgtgcatagtagaggcctctacaaaaaggactaacagtacagatgtctccaaattaccttagttagactttatatctttaaaaaaaactataatggcatgaaaatgatacacatccattaaaattatccttcaaattctgaagacaggcagttattgttcatacaatgcagagggccatggggacccacttggagacccttagttcttgtttggcagtgttgatgggcaactctaaaggtaagtatggaatcttttgaacaagggcttgatggacagcaattcaggttcatcatggcaaaaagcttgttttgtgatgtccttggttgagcaaagggagaggcaatctactagcccacttttcatggtctccttaaatgcctgaaacaagagagagagagagagagagagagagagagagagagagagagagagagagagagggagagagggagagaaagagggaggagagaggggggagagagagagaaaacacaaatatttatgttctatgaagctactttgtctaagatctatatgtatatctgggtgctgtgatttgaatatcatataaatgtatatatgatattcaaatcatatatacatatatatttatatatgtatatacgtatatgcatgtatgcatatatgtgtgtatatatgtgtatatgtatgtatgtgtatatgtgtacatgtgtacagtgtgcatgtgtgcatgtgtgcatgtgtgcatgtgtgcatgtgtacatgtgtatatatgtatatatgtatatgggctgggagcatgatgcttacaactactgaagaggttgttttgctgaatcatagcatgacacaggacactgtgtggtgatacaaaacaagcagctagctaaagcctttctttttgataatgcctcttctactaagaagcttgcttaggactccagccaattctaaagaccccacccctaccaaatgcattttcactgaggaattaaattgctaacccacaactctgagggaggaaacattcaaactacagtatctgataaacatttgatcctcagacaaaagagtttcacatattacttggagcatacttaaactgtacaattatacccattttatcagaaaaaaaaatccaaatataattctgaattacacgcttttatgtaccacaactggcaaacctgctccaggcatagaggtaggcaggatgcctaagggcgcggcccctggaaggtgtaacagaagtggatcaaagcagaacaaggcacagactttggaggacactatctcatgatagccagatttgtttcgagagagtgatagctcaagccttttggatataagacactcaacccatcatgtgagcctccaactctgagtcacacttcctctgtaagagtctgggaagtagattccccacggtaccatttcctaatttctgcacctggatcttcccacacccatcatttggcctcaaggcctcttccttaccgttctgtttccacctgcctgctctgtgtgagaacgtgtctctctctgtggactcctcccaggactcctggtcattcctctctgtctgacacggccaaccacagccagataattcctctttggctggggctttcatctcctaacagtggatgtgtgtcctggcgctgtgaataactgataattgcctgcacaataagccagtgtatgtttcttcctgaatcctttctctttgactgtgatcaagcatgtgccagactaaccgctcctgagtagcccataggaacaagaaggcactcacaccccgagcctcaggttgaccataagcaatgcaactttccctgagacataatctctaccgccccgtgtgccccagcatcactcctgtgttttacagtgttctgctgaaaagaaacatagcagatacagtttagaataatccagagccaagccacgttgccaatgggtgaaatgagacagtgccatttgcctttcacctcttgcttcagttttcgaaaaattgtccccagtgattacagagtatttgcatttttgttggcttgggaacgggaattggcagcatcaagtgtttccttgcttagagccacgtcactatttacgtagcaaacattacaagtcagagaacggagcattacagggaaacttcttagaatgctcacaatcaaaggagacaaaaagggaacagttggttgtttataaacatgacgaaggaagaaagggacaatgttgctctagagtcacagactttgtgactccttattacatgattgatgaaaatgacaagtctcatcttctataggattgaatgtggtttttttttctaccatatgcattgactcctggtattaaatgtgttcccaacaacttctcctcaatggctgatgatctggggatgtttgatactggaattgtctgaagtcacaaaacacttagaggatttttgcaatttcagttaaggtatattcgggaccttatataaaataaatagttgtattgttgcccacaaatacatcactttactaataatgttcagtttagctcttgggatccatgcccagctttttcacatggatgctgagaatttgaactcaggtctttatgcttgcagagtaagcactcttaccaactaagccatctccccatacccctgactttaacccaaagtggagcaaatagatgcatgcatgggtaagacaggttcacaaaagcttacttcttgggcaagtcacagtgatggctagtggcctctctggatctctcttcttatgtgcacaattggactaaaatgcgttgccctgaacaccatacaggtacatttgaagggtgcatatcattatgtctgtgacagttcccaagggctaatgtaggatatacgtaatcatagtctaagtgggtgagcacttgcgatgcacataattttgttgtcagagcactgcagaaagcagggtcaccgccactcttgaacgtgggaaagtgaactcaccacccacgccttcacccctgtgaactctagacacctcctctcgtccatgtatcatgaagtggttgtcagggctcacagtgggcgttagtccatgcacctggaatcaaagcatcagaggttttgtcttcgttttaaatcagaggcaatgcattaaaacaacaaagtttttttctttcctgttttattttttaatgttttataaaataatttttcccaaagatagaattttacttaaaaacaaaacaaaacaaaacaaaaacaaatgtagttctcattttaaaagagtgaggtcatcagaaaatacatttatccaaaacaaggtctccgtctcttggaagagagagtactgggaattgaacccagtgccttccacacacaagacaagcattctactgccacggtacaccctaggctgaataatgtctttctgagtatctaacactgactggctctataaaccacttgttcttacttgtgaatgtataattttaaaaggtcaattctcaaaatactgagctgcagtctagcttttcttaccgtctttttatgggaagtatgaatgaaaagtttgccccattcagacctcgatcactgctcagtggctccttagcccaataacattagtaatctcctcggggagtatggagctctgcctttgggacggatgctcaattcactaatttcctgtgacatttttcaaacaacagtccgccatctcactgtgacatgtatcgattttcttaagtgtcagtgcgaaagaggatgggaaattgcctactggcaaaattgtccccattctttcaagtctgactgtgatttaagaagttcttagtggtcagctagaagggcccacctggccattccttcctctccaccagcaacaatgggagcatgtgattcacaagggaatcacattcaactaaaaagagaaaccggggtatgctgtttgcaaggaacggttgaaactggaactcaatatgtcgtgtggtgtgaaataaatgtgtgtctcacatgttttcccatgctgggggcaggggtaagaaagtaaaaggcagactggttaaagacatggggtggggagggctggagggacgagtggtaagaaatggcgacagaggagatgaaggtaatgtcataatgaaacccatcactgctgtgtgcaactaatagatgctaataaaataggaagttttaatgatttaggtagcttattgcttgcattcacctcactgttaaactatcacttctgggggatccacacaacgagcgagcgagtaaaccagaagatggcgttgaagattagtaatcatatcttttaaacaagataaccatgtgaagtctcaaaaggtttcttgtaatgactgttgtttaaacttctgaaaacagaggatgtagattggctgaggaaaatgttgaaaccgcctaagtcaaggtagaagacacgtgtgtctaagtgaaaaaaagaaaaaagaaaaaaaaaaaaaaccaaaaacctcgggttggctgcttctgtccttagtctgtgcacgctttgaagaaatgtaattcctcagcagcaaggctgtgctatctgaagctacaatctctgctttgctccgaggtgtgtctctggtgaccgggatagttcccgacagacagaaggtgttcaaagaatatttttgaatgaatgaaaccccaaaggaagaagaggggaaaatgggtgtgaccaaaattttctttgaacgaaactctgttgtttactaccagggctctgacaatggaaaactaattggggtgaaagaacgacatggcatcctgttaatttctgagaaagcctgttgatgttaggaaaaaaaaacatgccggtgggcatctctgcaccagttttcctgtggccaaaatcagatgtttctcctaaagtccagaacccaggatggaagattaaaagaaaaactgagaaacatgtgaaatgaaaaagttgtcaaatctttacaaacgctccaagttgacctgtggtggtggtaatctaaaatgatacagaaactggtagtctgcttgcttacctgaaaacaccaagataacatataagctccaggcatccaagctgagctggagaaagtcagcggcaaaagctcatggagtttacatatgaaggtcaaagaaaacacgaaaataaagtaaaaccttcagtcagcctagctgttctatttggggcattggtacctcaccggcaactgcctcccacgaggctgaggttaaaattatcattttaaggtgaattgacatccggaagcgcgctaactacctgagtactcagggatcccccatctcttttatgttgccatgattgaaactttggggactgtgcttgtctgagtcatctcaattcgtcggtttcattcacccaacatgtataagcgtttcaaacacagtatttgggccacggcttataaacttgcctttctatttttctttttagtgagcgtgatattctctaaacgctcagagagacaagactccgctttgcccaaggatgctcccgacctctctcagtctatctcttctgtcacatgctgtgagaaccaagttccctgtgctccagactctccatcacttcccaacctggccatgagcagttagtagttatcagctatgctcagtgcagattccagtatcccctttgcatgcctccaccttcacaggaacgggccataccgacttgtcccatccggttgaggatttctgagtacatcagagtccccagccccctccacaggaggagctgaagaaagccagggtttgtctgaagtgggacagcccttgacccggtgggctctagtccgaagctcctgttcctgcgggacacccaggcacaaggcagaggtggggggcggtcctgggtatgggcaagccacgccctctcaaggcggggccgaagcgcccgccctgcactccgcctccggctctataaagttcctctttctcacctcactttcctagtttcaccacttgaacttgggaccctttgctgccctcagctaagagtgcgggtgaggtaaggcctgtagtcgggcagaaggaggagtgtgaggctggtggcagaggaagcctggcttccatctctgagcctgagggagaatgctgagatagcggacccaggctccgctcatctacgctgccctaggacctgtgcacttcgggttttgtatgaagctgtttgggtgggagttccagaacatcccccacgggctgggcgggacgagctaatgggactgtggtgtcatcaaaggatcgcactggccacagcttgtcctcagagggacagcctctgactctctctgctccagtggaaagctcctttccagccctggttcctaaaggacccaaactcatctagggctccagagcgtgattcctaggccgggcagccaagaagagctgagagctccaaacttagggtgctcagagcccctttccccgcatgccccttcttcacttctctggcaagagtgctagtgttgctgtccgcagcaccccttattcccagcctcggcttcattcctgccagggttcacgctgacattctgcaggttggaatctcctgtttcttggctgcgctgcttgccccataaccagacttccacttgttgcttccaggacccacgtgatggtctctggttgggtaggcctggggttattccgaggacaaagtaagggtgtcatagaagaaagtcaagagagtaagctaggtaccgcaaacctgcatggcagggacacaggacctggacaagggctagtccatgtgccaggtccttttcgcctggggcagccagggcaacctaaacccaggaaggggcaagtgtagaaacagtgagggaaaagtgggatgaaagctacttggatccagcacagagggacgagtgagcaaagtgagcgccccagcgtggcgcaagacttgggatctgcagagaagctgtgtagctaggagctttcaacggagcgtgttaatgtaaatgtaaatgaagaaattacctaatttttttaataaaagaaagaacagacaggcaaaaaaaaaaggaggaggaggaggaggaggaggaggatggtgcgcgccaagggatgctctctataccttcgtcaaagtaccttctcttgggggacttcggaagactctggcactgcacccgagcaccttggcagcctcagagactcggggcctcgtgggcactgcaagagtttgggacggggcttcctcccgcctccaaagtgatgcgaaggtagttgcagggaatgtgtgtctctcctcagcgcacaagcccaggaggaggtccgcacgcgtcatgaacttggagacgggcagccggggctcagagttcggcatgagcgcagtgagctgcggcaatgggaaactccgacagtggttgatcgaccagatcgacagcggcaagtaccccgggctggtgtgggagaacgaggagaagagcgtcttccgcatcccgtggaaacacgcgggcaagcaggactacaatcgtgaggaggacgctgccctcttcaaggttagcagcattcagggatccctgggcaggggtgggggtggggatggggaatctgaaagctctgaatgtctgtggctcccgggcaagggactaagaggtgggctcctgcaaggaggaggccagagcatcaagcattggaccctgcttaggcaaagtccccaggagaagggaaagaggttgcaaactctccggggattgcatacacaagaaaccaggtcccaatactgtttgtgtggaggaaagaacttccagcttcaggggcatctctgggggaccgaggttccgtttgcatagcccattcgctgtttcctgccaccaccaccgactgctagggccactctctgcttccctgtctctctgtgttttgttatttttctgagtttctctctctgggttttgtttctttgattgggcacctctactgtctggttctagttctagaagctgcgatctctgattttctttctttgagtagctttgactattccgagtctttctctggtatccccctccgaccccgtgtgagtcccttaggactgatgtccccagagaactggctcactgaactgtgaagcccccagcctccacctgccagcaggccgaggaaggggacttcctgcgggaatttgttcaaagtacctctgtgattttgtagatgtcctctctggggcctgccccctccacagctctgtccccagtcttgcccacacttgattcaggcgctgggcgtgtacagcccatactaggggtctcaggaccccactaacatcatgttccacatttcaggcaacagcaaatttgaaacagtaaccttccttgctgaaatgcaatccatagaattcttttgacgctctgggcttgacttttcttctcatcgttcttaggcttgggcattgtttaaaggcaagttccgagaagggatcgacaagccagatcctcctacttggaagacaagattacgatgtgctctgaacaagagcaatgactttgaggaattggtcgagaggagccagctggatatctctgacccatacaaggtgtacaggattgttccagagggagccaaaaaaggtaaggggttttcccagcccaggtggcaggataaaggcattatggcactcagagagcccttcttcctagagacagtcacgtcctacctctgctgtaggttaagcccagatgtccttttgcccatgtcctctctgttataagtgacaaccctgtggtgttagtataggatgacctggcagactttaagccccatgggtgtgtgggttatgcacttgaaggcattattttcagttactccattcaattaggatctggatcaaatttccaaacaaaatctggaaaatccattaaatgtttacttacctaatatcctctagtaagcattttcaagaggagaaagcacatcccacaccccatacatattcacacttcttgtaataaaactgctagagtttctggtttaacatggcctgctagggtggttatgaatattcagatcttgagttccctctcttccaactagtctacctcaagcagtgctcaggaatctgcatttggttccaaccatacaggatgccttaactaggtaccatctcacaaccagaaaccacttggtggatcacagggatcctgggtggtgtttccttccctggctgtcactcacaagtcagcaaatgtttaatcagtttaatggcaaagacaaatatctctctaagaaattgcttgaaaaacaaacaaacaaacaaaacaaaacaaacctaaaatacccgattggttaatagggctatgcattctaagaattaagtgcataggtacttttataagatttaagtcagttccttgtcttactctgtgttctctcttccttttccccaaacacacaggagcaaagcagctcactttggatgacacacagatggccatgggccacccctaccccatgacagcaccttatggctctctgccagcccaggtatgtggtagactcttggtcttgtggaaggctggcccatgcccttttgactggctccacacagagaggcaaacacaaatgaaaagtgtagggctgacttcttatttgctatggctagtacacacgctgaacaaaaacttggtcagagaaggatgtttcagttccagtgtggtgtcactgtccctgacgccacagttttgttggggagtttgatgtgtcccacctgtggagagaggcttccactgatggtcagatcttctgggaatcagaccttttgtggaagtcaaaggttttggaagtagtactttatcatgtgaaaccgcagagcagctgacttctctaggcgtccctgatgtgaattacagtactgttttattcactttggtggcttaaaaagggcagatttcactgcggtattcttggtgccgtgttcagccatatgatgaagccttacaaaaatcacagctttatacaatgtcctcattgtgctttcagaccctctatggctgttttttacctagtgtgatagacagtccatgtcactttttgggcaaaatgacttggctgctggacaaaaaaaggggttccctgaggagtttgggtgatatgaaatgactccgacacccactgatgtcttcctcttagcaatccctgtgctctgtcagcaggttcataactacatgatgccaccccatgacaggagctggagggattatgcccctgaccagtcacacccagaaatcccatatcaatgtcctgtgacgtttggcccacgaggccaccactggcaaggcccatcttgtgaaaatggtaaggattgtgccagggcagcagacagaagaacaacctgagctcggggtgtggacagcaccacagggcttttccctaccattgagataccagagacacatcatatgaagctgctactgttgttgttgttgttgttgctgctgctgctgctggggtggtggggtggtggggtggtggggtggtggagtggtggtggtggtggtggttgtggggtgttggggtatgttgccttgtcctgtgaaatgttgaagtccttagatccatgataggcctcagtctgtgtggggacttaactagaagaccccagagatcattccaagtagctgaaaagtgccccatttttaatacatagagaaaaacatggatgacaacaaattctcaatgacagtaatgtcaattataaaactcgtctatattttgttttaactgagttatcccttatttccgatggtgattaagttggggggtttgttgtatcccacctatctccctagtctgtatctttctactctcctgtaaagtagagagttgtacccagtccacctcagcaggaaatcattgctagttcatgtctcttgaataataatgagtcatctatagctgttcttggtactaaggaaggaaggatcagagcgaaagtaatccacaaagtgtctctacaaatgagtgccctgcccgaaagacccacaggggtccccccatgctagctgggctctcacagaagaaacgcccactaaccagacacaaaaaaatttcacaaactatgttcagtgagacttgggtcctttagtgtttatttaggtgagtgcaccaagctccacctcgggtccttttttggctgtgtattttaaggtagagtcttgctaaattaccaaggctaggatcttcctgccttcaactcttgagtagctgggactacaatcttgttctaacgggctgaacataaaacaagtttttaggacttacaagttcactgtttaaatataagtcttgacatgggtcgccgtgcgagtagttcttttatattgttctggcaatactttccttgtgacaatttcatcaacaccctcactcagtctgtgcatgcttacactaatcttgctttagtgtgacataacttctctgctgccagagaacacggttcagcccctccccctagctaacaaacagtgagcagaataaatgagggttgaataattaattcatctttgaactagtcttatagaagtttgaactctgaccctgctggtaacttgctatgtgggctggtgcaagtccctctccttctgggcctcagtttccctatagatttggagtgagccccaggtttccatccagagctgtactgtggctccttccttcatcaccctaatttttatcactggatgtggactttggactttgtcccataatcacacgttatgctgctagcaggtgcttagaggctgtcaggcttgggttggaggccatggcctctcccaactcaagagcctccccgcactcagactcgatacttagacatcatctgatttttatttgcaaatgcaggttgccaggtgacaggaaccttttatgcttgtgccccacctgagtcccaggctcctggaatccccattgagccaagcataaggtctgctgaagccttggcgctctcaggtgagtgtggcgcttcctgtaaagctccgagggagggggcatctctcctctactgaggttgggtgaggatttagactctcgccttgcaggccccggggtctggagtaggcatggtccaggctatgtggacatcacgctgagtcaaatacactattagaaatctccacagcagtaccagctagccaaatactatttggacgatgtctttaaccttctacatcattacctgcccagttttccaggaatgtgtaaccaggctcctcctccagccgacattctccattctcgcagtgtggaaaggctttataggcacaaaagaatgctgtttgtccttttagggtgtagggttggccacaaacaggtggtctgagttgcttccaaggaacactggttctgaaccctggtctctgagaagttcttatgccccctaaaggatcatataggtctgactccctcacaactttgacagaattgctgagcatgtgtggatgtgatctgattttaaagttctgttactaaggaagcctgcacttggagatactgaccagcattttaaaagcccacactccgtggaagcagacatcttatgtccatttagtctttagatgatttttttggatgttttcaaatggaattattagaattctcatcatgccctcggctaccttaaaagcctctgactgaaaacatcaactgcattttgacaattttagacacttcccttgttctcgagggaggaagaagttttaaaatctagttccttccagctctgatgctcagggagactttgtgagccactcaagaacagccgaggagcacatctgggcatcagggtttgtcacagacactagaatgctctagatcctcttctggagcgccaaagacttgtgtgggtgccccaagagtaggaaataaacagctatttatatctctgcaatcttgtgattttggtgacattaaatgaaatgaaacctgccctaccactcacctcagatggccaacgccccctctctttgggtgcaccacttgtgctgttcatagctgcagctatcgaagacaccatgatgtgggctgtcagaacttgccattgaagaatacgaggcttttgtgggtttcttcttctagtttgcataattaattatcaaccctgagtgcacttttcagaaagctattctttccaggcattgttggggctccaaccaccagcacgggtatctatctctgcctggggagccctttgcacacccagcttgccctttcggcccgtgggtggtattttaaagtggcttctgaaatcaacaaaatcatgtgtcaataaattcctgtcttaaagctgtagaaaacctagttgttgggttcttttcagagttgaacacgaagcttagagggatttcagggggttttacattaaccactggcttttagagcagttctcatcaatttcttcccctactccaagagagctgacttaaaaataagaaaataaaggtatcattttccagagcccagaaattgttattttagtgcctgtctctaacatatctatgtgggttttgttgttgtttggttttacttaatgacatcatggtaacaccttagggaagttccagagctgaggacactatttgcttttcttctaagatgtttctgtatttcttttactaatagaaatctgtcccagaggtcaactccaaaatcaaaattgagttgctggaaaacgaattccaattcggtagtattatttcatattgtagacaaaatgccaccactgttaacaccatcatccgaaaagccctcataacaggggtgtgctttctaataaaatttggctgaaaattcaagaaatatatacctctccccaagagaagtaaatggccacaacaacatttgaaaatgatcgtgttagagagatcagtttctttccacaagcttctcttagtattctgtgcttgaggtctaagaatctacagggaataagagcagctaacatctccaagacttccttggtcctaggatctttcacttgttcgtggagcatcttgacactcaagtgttccacctgctgtccttcgtatcagtctagtcaccgagtttttggggctctgagcaaggtggcacctttttcaaatccatcagcactgactccagagttttgttcacagactgccggctgcatatctgcctgtattaccgggacatcctcgtgaaagagctgaccacgacgagccctgaaggctgccggatctcccacggacacacctatgatgttagcaacctggaccaggtcctgtttccctacccggacgacaatggacagaggaagaacattgagaagttgctgagccacctggagaggggactggtcctctggatggctccagatgggctttatgccaaaagactctgccagagtaggatctactgggatgggcccctggcactgtgcagcgatcggcccaacaagctagaaagagaccagacttgcaagctctttgacacacagcagtttctatcaggtaacacacctcacagtctgttagaatggaggtggtggtgggtgctggctataaaggtctcaaatggcagtgtctgcctaccccagacagaggtcttcctcctgagatctgtgagctcatgcagaaatagaattcctgcctgattcatgcctagcctttgtctgttgtgtactcccctgattagcagagggccagaaagaggatccatatttgctggccaggatagacactggtgtgggttgatctcttaatttatcatcattcttttcactctaggcttttgttttgtttgttttgtcagaatatatgtagctcaggctggcctagaactcctgcctcgggattttatctgtacaccagcacatctggccaatgaattaaaatgtgggctttcagcggcatgtgccccacccccagagaggtttcactgtgttggctctctgctctcagcaagtttatctgctgacacctcagctctttaggggtttctagaaaaatcaagaaggttagaaacaccatcttaacatttttggttatgagatgtgtcacccttataaaattgtcacacttgcgaggcaggaccaaagctgagaatgtaaggagcagattcagcgagggggaaattcggagaagaatttggtcttatctctggcatacgaaggcttctaatcatattttccagaacctgtacttcttatggtatgatttttgactttgggtagttacgttagaccagggctggcttatatgaagtcattagtcttgccactggtgggtaccacccagaggcctcccctagaaacgtagccgaggatgcctttaaggaagcaggctgctctgctgactgctaattgtcattccctcaccccatcatatcctaagcttgctttcttcccaatgcccttcccaagcagctcacagctctggctttcctgtgctttccttttcttgaaccgggacttgccttgctccttctcatccatgcacactgtgatgctttaaaatgcgtgcacactaggatctggctaaatccactaattagcatgcatatcaccttgcctgtctatctttttttaatttggtaagaacattacttgaaatctactctcgatatttttttaagcacatggtccattcattattagtcatgaggattggtccttgagcttgtgttcagcaaactcctcatgtcttagtgacagtttatattctttgacccacagcttcctagccacttcccacgtgtggtgaccgccatttggcgctacttttatgagctcaactattttggagttcgcaatgcaatggagcgtcacggtctttgtctttgtgtgcatgggtaatttcacttggcatgatgttctccaggctcatttgtgtcattactaatgacaggccttccttctttataaaggctagggatattccactggggtatctgtatcgtgtcactttctctttatctgtgtatcactgtgggtacttgggatgatgccttgtctaagcaggtctgacgggtaacgctgagtgggggagtatagctgtctctccaaaaccaatttgctctgccttggttacgttagaccagggctggcttctatgaagtcattagccttgggtctgcacacagaaggggactgctgagtcctcaatgtgctgcttccttctgttcatttacaaagaagacgacaagccctagtgtgcttggtactagtggtgtttcctcagccttttgagctccagtggccaatatttgtttaggctcatccaaatcctctttcgtttccaaaaacaaacatgctccttgctaaatatcctcccctgagaggtgggacacagaaaagagaatcatctcaggctccaaggtgtctcaggctccaaggcgtctctggctccaaggactgatgaagatccttggagctgggtgtgatctaagccttggtcagacagcctttgcctctcttagagtgagttctagtgtttgtggtccaaggcaaagaaaaataacttctggagatggataggtacacacatcctatatctgccctggggtctggaagtcctatgtgccctccagaaggctaccactcactccctgcttgattaaggtagctcagaatagtgacaattgccagcgacagggctttgaggtacactaagtcttggtgtgccaaagaggatccaatttggcaggaaacaaatgccaaaacagagcagacaccttggactagaaatttgcttcctaggacttattagttattaatgagtaagggctatttccctttgttcccttcttctctagtggggcctgttgtttttgctgtccacagtccccaagccccacagaggctcagggaagatgacattgctgcagagaggcccaacagcctcagaacctaaggatgcccacccaatggtccgggaagagcaggctgaggtgggctttctcagagagtcgcatcccttgctattctgacctagcccctcgtaggtgtcttcccggccacagtgctatgcactttatacagtgtgcctaaacccctgggtttgatttaaattctggaagaagaaagagaaagaaatgcaggaagtcagttctgtgagcttctagaagcagttcggttgcagagagcagtggaaatctttgatgtctacccattctggatttgcaccccactagggacagtccccataggcacagttgagaattcatatctgatcagggcagagtcttcatgcctgctctgtggaggcagctttttaatgtcagttctttgatgcagacaagacctgggaacctagctctgggaggaggaataaaggttaatgccagtgagtggatgtggctttctgcttgtgctgggggaggaagccaaggccttgcacatacaaggcaagtgctctgctccaagtggcgatgcccccagccatgggcaggtttcttttcagcaatcttgtctgtttcatgtctctcaggcaggactagcctcagcatgacatccttgtcagaggggcttcattggtccccttctccctgtatcatcctgtccccaaagtgagattgaagcctactctggttctccagttttggagttttagacctagtgccaagtaggacacagctgccaacagctggtgagagaaacagatgctcttggtgcccagacaccacgtggcctccatggttagctagtgaggttaaaaaaataaccctgggccatcagaacattgtgactctttacattaaaatgtctccttggcctgtgctgattgcttgactcagcatggctacttttctttttcttctttgtcttcttctctttgaccttgtgcatttctgtgagtgtagtgctgcagacccaagttcttaaggttgggtcatgttccttaagagtaatgaagtaaaaccagtgccaagtcaggagatcatatgtgaacttgaccatgtgattttgtgtctagggtctgctctaagggctggacttaggggaacagagcccgggctctcccaaagcagacttccacgtgactctggctttccgttcacccgctttaccaggtgtctgaacagtttggtttttttttttctttctttcttgtgggttttcagagctgcaagtgtttgctcaccatggccggccagcaccgagattccaggtgactctgtgctttggtgaggagtttccagaccctcagagacagaggaagctcatcacagctcatgtgagtacctggttacatcacccgtaaatcacacactgtggagctgtcccttttagagaagtggcaagtgacgagtaaatgtcagctcacctgggaaaatagatgtagaccttaaaatagtgcaggaggaagcaggctccagtgaacaccacagctcagggaggcacccgcaacctacttccagacaaattctgtcaccaccgaatcagcagggcagatgacttggacccaaggctctgtttgttctgtattctttattgtttcatacagacagttacctgcccttttataggaattttcaatagttgggaccaagtactgcccttcgacatctctgtttcttgtgtggttttaaagatgctgtcctttcgagtagagtagcactttctccctgggaggctgcctgttatgtattatgcttcatcgtgcctcctaacttcagatagttcccagaccctcgttttgttgctggactttagggagttatttaacagttggacaagggaggtggaggaggctgagtcttcccaggaatcaggtaggtcggtctatcctcacagctagggtttattcggataatgttcatcactcacttaataattaaaaggtaattctgaatacatgatgttttttaattagaaaattttacttaattacatatcttgaaaagtatgcagtgtggagtaaaggttgtgtcccagatagccacaatatctcagtgcaaatgggatattagctctgatgatatctcttagtggagactgaagactaggcatacagcgcaatggaaggcatttgctaggcagtggtaaagccctgggttctaaaccccgcctaggatgggggttgggcactgatgttgaacatccagcctcccttctcggttgcaaaaagtaaaatctaagaagcaacaaacgggctggagagatggctcagttgttaagagcacaggctgttcttccagaggtcctgagtttaattcctagaaaccacatgtgccttacaaccatctgcagtgagctctaatgccatcttctggtgtgtttgaagactgctacagtgaactcacatacatataaatcttaaaaaaataaaaggcaatgaaactatgatcctggccttgagccttttctcagttctaactggtggttgatatcaaatgagactgcagatgtgtggatgaatctagcatagataagcagtatttttttttttaaggtagtgagtaaattctagcatagatctcattttaaggactttgggtgcagtggggctccgcaaaaagggagcaacaatagtcatataggcaaagggcctcaaaatgctgccccgtggtccacagatggaaaacatacatggtcacccatgaactctgctggtctccttattacagacttaattcatatgggtgcttacagaggaatcctaccagacatcacatatcaaataacaaagaggcttgatttattgatgattggttgttacagagcacacagcctgacttggtgaggctggctttgactggggatgcaatcgatgcttataaacaaactaggtccatcagagccagcgagctgctgtcttgtggctggccagctctgtcttctacttgtggttcagagttctgtctatttcacagtcatctggttcttcaggatgagcccttctgtcagactcatgagcctcacttacccagcatgttacttagccttttaatttggtcatctcattcaataatgtccagttaactcattcgctaaatatcaaatccaagaggtgattggtttcaaaatgccatatttatcttctattatagaatcaagagttctttttccagggtttttaattccaggtattataagagcaaatgaaactggtttttcaaatggctctgaatgtgaactgcttcactgtgttatgttatcctgtgcagcttgtaggtttttacttagagtcctagggtcatttcatgatgtcccaattgtatggtgttgagaagaatattctagtgatgtctttttttcttaaatgtcttattaaaggtggaacctctgctagccagacaactgtattactttgctcaacaaaacactggacatttcctgaggggctacgagttacctgaacacgttaccactccagattaccaccgctccctccgtcattcttccatccaagagtgagaagaaatactctgacagggcagccggctgctgccctttctctttggaagagctaagaagtgagtgggtttccacttgaagacaacaacagggctttgtgaggaaaaacagctgtatctgctcaacagaggagcttcccccagaagagtgcctgtcatccaggtcttgacaagtgccaggacttgggtgactgtgccctggcttataactgtgaaacttgatcagtgttgtgtttacatgtacttgaatgctggctttagcctggtatagatggacttttgcttgaagactgaaaacctgtgccagcatgaatccctgacaagagaagacatacgtattattggtccatttctcagggaagtaaagtctagactagagactacgctgtccactcacagagaaacgcattcctggatagaggagctgtaggttgcccagatcatgtccactgagtgaagggacttggttcttaggtccagtctaggctatcatgtcctgatcctgcactctctctgagtagaccctacatcctgtttgctccctcttcttgcccttccctaaaagccagctggtggactcttgttgccacatacttgagccaaaaaaccatcagggacatataagatgagacatgtttgcatctcctctgatctaacaacggctacaaagttttttgttgttgttgtctcccctttctgttttgcctctcattctttagaattgttgcttttttgtaaagaaaggaagagagagagaccgaatatactagagatagatttttaaaattctgtgccatttccccttctatttgttttgttggccatcagtggtccccatggcaacactggaagggcggagcctttgagcaggttgggaactgtcccggacaccagtggttcagtgtacagctgtagactcagtgagctgtttctgcttattttgtatattagatgcttccttgtgccaataatagtttgacagagtctcaaagctaccgggcttcttttccaacaacacattctttcacagaatcccaaagagtctcacttgccttcacaaccgtctgatcctttattgttactgttttgtttaggtggctttgccatgctctgggatttttctcctaccacaacatcattcctgactctttcgggctcagaaagagttaagcgctcttgcacacttggcacttacttctttttaattttttttttaacatgccactcttaatatttcttcttaagtctttcagcagcatacattcaataagcaatggaccattgggtgtctcatttcattgttttatttttaaaaaggaacctttgacaaataatacacattacagaaaatggaagcatttttcatagagaaggtaagaactgaaatgcattttatgttcgaatcctccttgctagtattagccccaagagttcagtctgtcctttaagcatgttttagttttcaatacatatatatgaagttgccctttcttagagagagagagagagatatgtgatgacactcttatgtacccaactatacagatttacctcatcttttgagtggcatgtggacttccactgctatgtgcctaggtgcagtttagacatcttcttagctacccatcccagcagcccactgagtctcgtgaactaaagtcacttatacatcttatagatgcaaaacattctggggtatattatcccaagggaagatgaaggcaaaatcgggaagcactcttcctgaggccccaagccacagctgtcctcctggagtatcttaaccatatctggcacttcaccaaggtcccttgcctggtcctgtatgaccatgactcttcagtccataagcagatgctttgtctcaattgccatgtgaagtcttttggtttttggtttttttccttaatgttaagctgttttaacagtgaagctgaattttctggaaaatgctgtatggttcgagcccccagttcatgtttcactttacagccatgcatgctgatgccttccatcttgacaaatggaatgatgggtaaacactcctgacacaaagaggaacaccttcctcgtcccttgctgaaacaaagtgcaatgcacacagtagaatttagtttgcttgcactggaagatgccgttgaagaggtaggctgaggaacactgtatcctagggagaaaatatgcaagtctcacgggtgctttctgttggcttgtttctggtccttgagcaggcttaagtatctagtttcaaactagaagccccaaagccctcagtcgttgtcctggacagagttggtagaccccacctgtagaaatccagatgcactctgggattggagcacagagaggcttgctctatcgtgagaatgcccagcctgcagaggcccaggtgcggtgcctgagtggctgtatgccagacacaggaacgccagcaggctgagtgtggtgactgatatgtgaggtgcccttgccctgcagacaggctgaatgtgagccccagcagcagaggattctgagagtcagggtggtgtcatgtcctacacaggaagagccttcaatattactttttaaacgaactttccccattgctgatattttgataaaaacccacacaaggtttaattacatgccccctcatccctctccacacagtcttgcccatcccactggtgaattgttgttgttcttgttgttgttttttgttattggtgaaaattgtgaaattgttaaggtctctgtttttgttatttatctccctaaatcacatggctgctgcatacattgcaatgttgccctaccacatgtatgtttttgcaagttgcttcttcactcattgaagaagcctgcaccgtaagtgaaactcacttagtccttgctaattgctgctcactgtcacgtgaacgcagagaaggctgattttcctggacccattttcagtgctttgaggaacatgagtccagagtatattgaagtagaagacagtgtttggcaagccagttcttattagacactgctacaggcttcacaatcttcaaggtggacccacctcatgtggaagggcatcattgcccctctgctcccatgcgctgtgcacccccttcacagtgaaagacctgctggggaccaggactcagagatctctggcttcgagctcatatcttggcttcctgtcatgtctaagcccgacaggaaagtgtggcaccatcctgcctgcggcgttggatggataggccatggattttgctgtaaacttgcttcacaaggaaagctgtgtgttttaaaatatttgataaataaaggatttctagaaagattgactgaggagcatatttaataccatcctcacagcccttgaaacacttcctctatctgctgggttcttggtgaggctgtcagtggcctacttccttcctggctgcctgtgagtccctgaaatcagatctctaaagtgttcagcagagagagagagagagagagagagagagagagagagagagagagagagggaggttctaactcatggctctcaccattccttccagcatacttttctcagatcactatcccccactgttctggctgttttgatccttagtcccaaaggagaggaggcaaagcaagagaaagtatgaaatcgtttctcagtggcacagagatgccactgaaaggtgaagtgcttagaaagaaaggatgttctatcatcatgagagagagctggccaggtgagcaggtgggcagaagtcttccagggaagagcagggtacctgtgtagacatcnnnnnnnnnnnnnnnnnnnncctatgttctgaaaggcctggtagacttggtgtttttttttttttctgtttgttgtgtttttttttcatttttagaaaaaaaatttaatatctagtgtgtgagtttacctacttgtaggtacatgcacatgcagtacttgtagggccagggaggggggtctgatcccctgtaactgtaggtacaggtggttgttagccacatacgcgagaacctggaactccagtcctctggaagagcaacaaggactattatccaagttgagccatctctccaattagggaaaatattttttaacttgttttaatggtttgttttatactttgatttcctctgagtttgttgtcatgagggtagcatatagtgagcctgcactctgataggagagattccgggggagaggcacagggtgtcggtagactcttgggtatccctaggagaaccttggctgaaattcctctctgagaagccaagtcagagaatgccgttctcagctgtatcacacacacttcctgacatggctgtgaacttccgtatcttccagtgtcataggaagactgtcagcccaggataggactgtggcctgtgaaaagctcagagattcagagatctgagaaaagcatttagcaaggatctaaacaacatattgaatttactaaataaaaaccaattgctctactattcctactttgggagctctgtgtgtcccataagtatagatgggctcaggccagcatgcacagccaggatttctccagaaagttctactacttgaacctaagcttgtttgaagagattttgctgacttttgagttcttacatgatattcctattcccacagggcttctggtcttagacttttctttccagttacaactttggttgttggatttggttttctatagttggtagtattaagacaaatacagggtttttcacatgggcaacactcatccatcccagaaacaaacaaacaaacaaacaaacaaaaacatggcgtctcctacatgccttatttctgggaagggactgcaaggttggttgtaatatctcatgttttctagcagaaatgtcttttaataaatgtctagttaggaattatagggcacccaaggatgtttcttctacagcctaagccaggggccagaggatgtctacacaggtaccctgctcttccctggaagacttctgcccacctgctcacctggccagctctctctcatgatgatagaacatcctttctttctaagcacttcacctttcagtggcatctctgtgccactgagaaacgatttcatactttctcttgctttgcctcctctcctttgggactaaggatcaaaacagccagaacagtgggggatagtgatctgagaaaagtatgctggaaggaatggtgagagccatgagttagaaagaaccatagctgcaagatgagagaacaactccatggttaacggtgtggatcaacacctgaaaatgatggagatgctgagatgggtctgatcagagctgactgtgggccagaacttacacacacacacacacacacacacacacacacacacgtgcgagaacccctcacacacacaggatggtggggcagagtttaggtactagaagctccttcaagggtgcatcttcaataataatcttcaattatctaacttttctcacactagaccccacctatcaaaggttgtacttaaggttgtatcacctcccagtagtgctcatcagccacaaaagctattaacattggtatttactgtttgtgtctatggcatatcactggtcattccttttttatttttttaactttttattgattgtttatgaatttcacatcatgtacctcagtcccactcatctcccatctcttcatatccaccctccacccttgtcacctacccgcctccgaaaaaaaatttttggaagctgcagtgtgtcacagtgtgtcccacagtatacccttttgtccacacttccttatatgcaaatgttcattgcaatgagtcattggtctggttcaaggcctctggcttctgttacactgtcaatactggatcctcaccagggctcttctcatatagaatctcctcctgttgtcctatgtcatggagatcttgaagctttgggcctgtagtaccctctccttcacatataccagcagttcatagatggcatagagctaactcaaaaccctggatctgggcctgggtggtagctaagttggtcagcatgccagctctcctgcacccacaccaccagggcaagctctccaggagtaccctggctaactcacccaatgccacaggcatctagagccagagcaagctttccagctctgccgttgaagctcacccacaccaacaccagcagagccaactctattctgctgctcaggcaagggacaggactcactttctttagtgttatagctagtgaggagcagggccagctctcctgttctcatggccttgtggccagcttccccttctaccttaggtggagaggggtaaggtggaagaggagggcatctccttcttgctcatgccaccccacagtagacaagttgtggggccagctctcccatgctcatacccacagggctggctcacttgcacctctgctgccagggttgactgtaccgtgctgccctggtgaggtgcagggcccacttttccaagtcctacagccagtaattgtcagggaacaatggccattctaagaaacacacatcactggcaaagtcaaccactgtgacatcaacaggatacaacctagagtcgttagatagaggaaacctcagttaaggaaacgcctccatgatactggcttgaaagcaagtctgtagtgcattttcttaattagtgattgaagtggggagggagttaaggtcctggggtcctgggtgctatggaaatcaggctaatcaagccatggagagaacaaggcagtaagcagcactcctccacagcctctgcttcagttcctgtctccaggttcctgccttgagttcctgccctgacttccctggaaaatgaactacaagctataagctgatataaaacctgtctttcccaagttgttttatctgtcatgttttatcacagcaatagaaaccctaactaagacttcataaactaagagtcaaaggatagaaatcaatctactaagcaaatggaagctaaaacaaaactgttagaaccatcttcatacctgataaagttgagttgaaaccttcaaaccaaaaatagccagaagagataaatcagatcactgtaacgttactgaaaggacaattcttcaggagcaaataatagagacactaccacaatactcttagatctgataaacatttttagcaaaataactgtatacaaaagcaacatgcaaaaaccaaaaaacaaaaacgccatagctttttaaacatataaaaacaagagatgacctaagaaagaagaaaataggataactacacaaaaatactagggctcatgttcattaagaaaccttaaaatgcacaaaaaaccgatccaggtacaacaatagtggaagatgtcaataattcccactcaaatcttttttgtttggtttggtttggtttggttttgccagatagggtttcaccatgaagtcttgccggactataacttgctattcgatcagactggcctcaaactcacaaaggtccacaggttagggttagggttaagttctcctgcctctgcctctggatgctgagattaaagactgtgacaccatgtctagtctcatccttagataggtctctgggatggtcagctttaattgccaacctaataaagtctagggtcaacatgacctgagaggagagtccagatgagtgactgtcaacatggagtgtcaacaactttgggcaagcctgtagagaatatcttatgtaagttaattgatgtaggaagacccagcccactgtaagtggtaccatccccttggcagggttcctgatctgtttaagagtgggaaaatgagctgagaaccagcaggtatgtgtgcattcatttttctctcccctcaactgtagttttaatttgacttgctgtttgagttgttgtcttggctctcccaaaatgatggactgcaacctagaattttaagctgaaatacaaacccttttctctctaagtggttgtgtgtgagagagggagagagacagagacggaggcacacacacactcagagaggggggagagagggagagggggggagggagagagggagaaagaggggtattttttaaaattacaggaacaaaaatgaaactaggagtttccaaactaaaagtaagcaaaaaaacttcacaattaaaacatgtcaggtatcaactggacttaagaggtatcaaacagactggtccatctaaaagatacaaagtatacattattctcctttagccatagaatcttttttaaaactaacctgaatctgttgcctacctgtggatcctgttctcctaactgagctgccttgtcttgcctcagtgggagaggatgtgcagtaacttgatgtgccagggtggggtgatatccagagcggctctccctattcagaggaggaatagggaaggggctatgtgaggaggggcctgggaggaagggaggctgtggtcagaatgtaaagtgaatgaataaattaattaatgaaaaataaaacaaaacaagacaacgcacattataaaccacaaaacaatccttatccatcaaaggaacatttgaaaacgcttgcactgcattataccatagtagaataaaactaaaattaaaaagtaacagcaacaaaaccaacacacattctaggaaagtgagcaatgagtcattgaagaagcaagggaagaaaaaatttcaatccctagagtcagatgaaaagaactgctcaacttactagaacttctgtggcacatctaaggcattctgcaaggaaggtgatggtcatatgtgtttatattagcaaaaagtatcaggtagacctcaaatacataattaaataatggggggggggagagggagagagagagagagaccaaatttgtatgcagaagattgcaagaaaaataaagagaaggtcagagatcaattaaatggagactaagagagcaatgcatacagccagtcagagagttggtatttgaagagataaacaagtttgataatccttgcagagcaaaaaggagaaaactctcagatgaagaaagtaagaacaaagcatgggatcactagggaatactttgaaaattaatttcaaaacctcagaagtccagaggaaatggatacatttctaaacacatatggtctgctagagttaaatcaggaaaatacaagcagcataactggactcaaaataaccaaaataacaaccagttgttgaagcagtaactaaaaatctccacacaaagaaaagtctcaaactagatagattcactgcttaattctaccaacctcttaatgaagatttaacagaatactcttaaatagattcaccaaataaaaagagaaggaacaagaccaaagtcattacacaaagccaataaaatcctgattccagagccaacgaaggatacaacaacaaaaactgaaaactgtagaccaacttcctttaagaattcacaagctctttaagcgctcacctttcttactctctagctctccttctctctctcccttctccccctctctccacatggcctctctctaccttctctccttccccctgcctttctacaataaagctctaaaacaaaacaaaaaaaaagcattcacaacaaaatacttgcaaaccaaattcagaatccaatagacaatgcatcttaatcgagttactttcatctcaggaaagcatgattagtctaacatatgcaaatcaatacatgtataaggacagaaatcagaagattatctcaagagatgcagaaaaggcatttgaaaattctcaatatcactagacatcccgaagaaactaggaatagaagaaacattataaagaccttgtaaaagcttacagctgactaaatggggaaaatccaagaggatttcttctaaactctagaacaagacaaggtcctcactgtgtctattattattcaatatactgcttaaagtcttagctagagcgacaaaggaggtggaaaaataatgggaatataaataaggaagaagtcgaggtatccttatttgcatatagagctatccctatttggagacagcatgcatacatttaaactctactcaagactccaccaaaaacctcttagatatgattaaatagtttctgcaaagtaacaggatacaaaaccatacaaaatcagtagcttttctatgtagaaatatgaaaccacctaagaaagataagttaaaaaaaaaaactattcacaagagcttcaaaaagagttagatgtgaacctaataaagaatatggatgcctctaaagtaaggcctttaagacactgaagaaagaaattaaaattgatattagaagatgcaaatgtcttccatgcttatggaatggcataagctaatattgcaaaactaactggaccactgaaagggaatatagtttaattcagtgtccaacaaaagtctaatgtttttgacagaaattctaaagttcgtattgaatcatgaaagtcattaaaaagctaaagcagtcctgagaagaaaacaatggtgaagggatcgaactatctgacttcaaattgtaccacagcaccacagtgacaaagacgttggtactgaacagattaaaccaacagactggattagagtaaccagaaattagagcccacacaactgtagccaaatagtttttgataaaggggtcaaaaacatacatatatacgttagaaaaaaagatagcttctttaaataatactaggagacccagatagccacatgtcaaagaatggaatcggattagtgtgtatcgtactgcacaaaaataaatttgtaattgatcaaaatccttaatataaggtctgaaacactgaaacttctagaggtaattcactcaagacagaagnnnnnnnnnnnnnnnnnnnnnnnnnnnnnnnnnnnnnnnnnnnnnnnnnnnnnnnnnnnnnnnnnnnnnnnnnnnnnnnnnnnnnnnnnnnnnnnnnnnnnnnnnnnnnnnnnnnnnnnnnnnnnnnnnnnnnnnnnnnnnnnnnnnnnnnnnnnnnnnnnnnnnnnnnnnnnnnnnnnnnnnnnnnnnnnnnnnnnnnnnnnnnnnnnnnnnnnnnnnnnnnnnnnnnnnnnnnnnnnnnnnnnnnnnnnnnnnnnnnnnnnnnnnnnnnnnnnnnnnnnnnnnnnnnnnnnnnnnnnnnnnnnnnnnnnnnnnnnnnnnnnnnnnnnnnnnnnnnnnnnnnnnnnnnnnnnnnnnnnnnnnnnnnnnnnnnnnnnnnnnnnnnnnnnnnnnnnnnnnnnnnnnnnnnnnnnnnnnnnnnnnnnnnnttaaaactgtccccagactcagaaaacaatcaccaacaaagcctggcaaggacaggggtggagcaggggctgactccttgtcagtgttagggcaagtgtgaacccatatggcctctatggagatcagtatggaggtttctcaaaaacactaaaaatagaactaccaatgacccagtcttttaaatcctggaatagaccaaaggatcctaagtgcaatcaagagatgtttgcccatccatgtttattgccgacctattcacaaagggataccctgagtgagacaaagaggagactcaaaggaataaagaagaggtaactacatggtagacatagaaaagatttaatgggttgaacaagttatgagtggtcagggaatgggccaaagttcatggacaaggcattaataataaacaattagtctcagaggtgtctttctgagagctgggactaggaaggaaaaccagattttttttttttaacaaggagaatctcagagctcccttctctacaggtctaatctcagagatttgtcctagggatggaccacagcggtggctgcctacatctgcctaggtctcattggccctccatccttattccctgcgttttatgtaacactgtgaccaaggagatgtccacacactcattaaagacttcacatagaaacaaggatcagagttgagtggcccaactttggagacctggggaaggttttagagctcaagtctttagtccaagagaatggatggatagacgcatgctgactaaggaggagatagatggctacccttttgttcttacattgttcctgagattcgcagaatggcatctcaccccagaggtaactgagtccaacaggcagggagcccccatcatttgatattttccagatttgctgtatgccaccaagagagcacacatagtgagaaaggaccgtgtagcccagggcaccggctttggaaagtgcgtgatgggaatggatggaaaacattgctgtgggtgaactttgttgttccgggtctttattctggtgatgctgttgtctttgttcagacatcttaaactcagttgttatgtcagtattagtaattccaatttcttctttaatttccatgcaagatagggcttgcctgtaaagtgcactgacagaggcagcgttctatatttagtgaggcagatgctatctgcaaattacagggaaatgattgcatcaaggtccctggttggtgaaataaaccacaataaagaaatgaggagccagagaggggcaatgttctagaagtcactaagaaccaaagttgcttgactctgactggtaatgatttcttggtccccaaatgccctcccatgcccaagcagcatggccttcatgcccttggggttagaggaagaataatcacattgaactatttcctctacaccctgagaaaatgattatcatcttcaccggacagttaagtgcctaaacctcaaaccaccagggcaactgtgtgattttaggaaggacgagaaacagggcatctattttgtgacttacctaaacccaggagctatcagagggcttcctgacacttttaaaagaaaagaaagcgtaactacaaggcaagcatagggccttcctgggccatgatggagccgagggttcaagtttgtagtgaccgtgccattttcttcccatcctgaatacagaattcactctgggattttcatcatagacaaacacaattcaggtcaccagagtaaactgcttctgtaatggtaaatttcccagcaggtcttaaaataaatagataaataaataaataaacaaacaaacaaacaaatacacacatacatacataacatacacacatacatacacatatattttataatagtctgtgcaacctaatgttatttttcagctcacatttatttaattattaggaatccaggttaccttaatttttttgtgcttgctacacactttcatgcataccaggt

SEQ ID NO: 50 - DNA, 4683 bp, Mus musculus
gggaccctttgctgccctcagctaagagtgcgggtgagcgcacaagcccaggaggaggtccgcacgcgtcatgaacttggagacgggcagccggggctcagagttcggcatgagcgcagtgagctgcggcaatgggaaactccgacagtggttgatcgaccagatcgacagcggcaagtaccccgggctggtgtgggagaacgaggagaagagcgtcttccgcatcccgtggaaacacgcgggcaagcaggactacaatcgtgaggaggacgctgccctcttcaaggcttgggcattgtttaaaggcaagttccgagaagggatcgacaagccagatcctcctacttggaagacaagattacgatgtgctctgaacaagagcaatgactttgaggaattggtcgagaggagccagctggatatctctgacccatacaaggtgtacaggattgttccagagggagccaaaaaaggagcaaagcagctcactttggatgacacacagatggccatgggccacccctaccccatgacagcaccttatggctctctgccagcccagcaggttcataactacatgatgccaccccatgacaggagctggagggattatgcccctgaccagtcacacccagaaatcccatatcaatgtcctgtgacgtttggcccacgaggccaccactggcaaggcccatcttgtgaaaatggttgccaggtgacaggaaccttttatgcttgtgccccacctgagtcccaggctcctggaatccccattgagccaagcataaggtctgctgaagccttggcgctctcagactgccggctgcatatctgcctgtattaccgggacatcctcgtgaaagagctgaccacgacgagccctgaaggctgccggatctcccacggacacacctatgatgttagcaacctggaccaggtcctgtttccctacccggacgacaatggacagaggaagaacattgagaagttgctgagccacctggagaggggactggtcctctggatggctccagatgggctttatgccaaaagactctgccagagtaggatctactgggatgggcccctggcactgtgcagcgatcggcccaacaagctagaaagagaccagacttgcaagctctttgacacacagcagtttctatcagagctgcaagtgtttgctcaccatggccggccagcaccgagattccaggtgactctgtgctttggtgaggagtttccagaccctcagagacagaggaagctcatcacagctcatgtggaacctctgctagccagacaactgtattactttgctcaacaaaacactggacatttcctgaggggctacgagttacctgaacacgttaccactccagattaccaccgctccctccgtcattcttccatccaagagtgagaagaaatactctgacagggcagccggctgctgccctttctctttggaagagctaagaagtgagtgggtttccacttgaagacaacaacagggctttgtgaggaaaaacagctgtatctgctcaacagaggagcttcccccagaagagtgcctgtcatccaggtcttgacaagtgccaggacttgggtgactgtgccctggcttataactgtgaaacttgatcagtgttgtgtttacatgtacttgaatgctggctttagcctggtatagatggacttttgcttgaagactgaaaacctgtgccagcatgaatccctgacaagagaagacatacgtattattggtccatttctcagggaagtaaagtctagactagagactacgctgtccactcacagagaaacgcattcctggatagaggagctgtaggttgcccagatcatgtccactgagtgaagggacttggttcttaggtccagtctaggctatcatgtcctgatcctgcactctctctgagtagaccctacatcctgtttgctccctcttcttgcccttccctaaaagccagctggtggactcttgttgccacatacttgagccaaaaaaccatcagggacatataagatgagacatgtttgcatctcctctgatctaacaacggctacaaagttttttgttgttgttgtctcccctttctgttttgcctctcattctttagaattgttgcttttttgtaaagaaaggaagagagagagaccgaatatactagagatagatttttaaaattctgtgccatttccccttctatttgttttgttggccatcagtggtccccatggcaacactggaagggcggagcctttgagcaggttgggaactgtcccggacaccagtggttcagtgtacagctgtagactcagtgagctgtttctgcttattttgtatattagatgcttccttgtgccaataatagtttgacagagtctcaaagctaccgggcttcttttccaacaacacattctttcacagaatcccaaagagtctcacttgccttcacaaccgtctgatcctttattgttactgttttgtttaggtggctttgccatgctctgggatttttctcctaccacaacatcattcctgactctttcgggctcagaaagagttaagcgctcttgcacacttggcacttacttctttttaattttttttttaacatgccactcttaatatttcttcttaagtctttcagcagcatacattcaataagcaatggaccattgggtgtctcatttcattgttttatttttaaaaaggaacctttgacaaataatacacattacagaaaatggaagcatttttcatagagaaggtaagaactgaaatgcattttatgttcgaatcctccttgctagtattagccccaagagttcagtctgtcctttaagcatgttttagttttcaatacatatatatgaagttgccctttcttagagagagagagagagatatgtgatgacactcttatgtacccaactatacagatttacctcatcttttgagtggcatgtggacttccactgctatgtgcctaggtgcagtttagacatcttcttagctacccatcccagcagcccactgagtctcgtgaactaaagtcacttatacatcttatagatgcaaaacattctggggtatattatcccaagggaagatgaaggcaaaatcgggaagcactcttcctgaggccccaagccacagctgtcctcctggagtatcttaaccatatctggcacttcaccaaggtcccttgcctggtcctgtatgaccatgactcttcagtccataagcagatgctttgtctcaattgccatgtgaagtcttttggtttttggtttttttccttaatgttaagctgttttaacagtgaagctgaattttctggaaaatgctgtatggttcgagcccccagttcatgtttcactttacagccatgcatgctgatgccttccatcttgacaaatggaatgatgggtaaacactcctgacacaaagaggaacaccttcctcgtcccttgctgaaacaaagtgcaatgcacacagtagaatttagtttgcttgcactggaagatgccgttgaagaggtaggctgaggaacactgtatcctagggagaaaatatgcaagtctcacgggtgctttctgttggcttgtttctggtccttgagcaggcttaagtatctagtttcaaactagaagccccaaagccctcagtcgttgtcctggacagagttggtagaccccacctgtagaaatccagatgcactctgggattggagcacagagaggcttgctctatcgtgagaatgcccagcctgcagaggcccaggtgcggtgcctgagtggctgtatgccagacacaggaacgccagcaggctgagtgtggtgactgatatgtgaggtgcccttgccctgcagacaggctgaatgtgagccccagcagcagaggattctgagagtcagggtggtgtcatgtcctacacaggaagagccttcaatattactttttaaacgaactttcccattgctgatattttgataaaaacccacacaaggtttaattacatgccccctcatccctctccacacagtcttgcccatcccactggtgaattgttgttgttcttgttgttgttttttgttattggtgaaaattgtgaaattgttaaggtctctgtttttgttatttatctccctaaatcacatggctgctgcatacattgcaatgttgccctaccacatgtatgtttttgcaagttgcttcttcactcattgaagaagcctgcaccgtaagtgaaactcacttagtccttgctaattgctgctcactgtcacgtgaacgcagagaaggctgattttcctggacccattttcagtgctttgaggaacatgagtccagagtatattgaagtagaagacagtgtttggcaagccagttcttattagacactgctacaggcttcacaatcttcaaggtggacccacctcatgtggaagggcatcattgcccctctgctcccatgcgctgtgcacccccttcacagtgaaagacctgctggggaccaggactcagagatctctggcttcgagctcatatcttggcttcctgtcatgtctaagcccgacaggaaagtgtggcaccatcctgcctgcggcgttggatggataggccatggattttgctgtaaacttgcttcacaa

SEQ ID NO: 51 - DNA, 1353 bp, Mus musculus
atgaacttggagacgggcagccggggctcagagttcggcatgagcgcagtgagctgcggcaatgggaaactccgacagtggttgatcgaccagatcgacagcggcaagtaccccgggctggtgtgggagaacgaggagaagagcgtcttccgcatcccgtggaaacacgcgggcaagcaggactacaatcgtgaggaggacgctgccctcttcaaggcttgggcattgtttaaaggcaagttccgagaagggatcgacaagccagatcctcctacttggaagacaagattacgatgtgctctgaacaagagcaatgactttgaggaattggtcgagaggagccagctggatatctctgacccatacaaggtgtacaggattgttccagagggagccaaaaaaggagcaaagcagctcactttggatgacacacagatggccatgggccacccctaccccatgacagcaccttatggctctctgccagcccagcaggttcataactacatgatgccaccccatgacaggagctggagggattatgcccctgaccagtcacacccagaaatcccatatcaatgtcctgtgacgtttggcccacgaggccaccactggcaaggcccatcttgtgaaaatggttgccaggtgacaggaaccttttatgcttgtgccccacctgagtcccaggctcctggaatccccattgagccaagcataaggtctgctgaagccttggcgctctcagactgccggctgcatatctgcctgtattaccgggacatcctcgtgaaagagctgaccacgacgagccctgaaggctgccggatctcccacggacacacctatgatgttagcaacctggaccaggtcctgtttccctacccggacgacaatggacagaggaagaacattgagaagttgctgagccacctggagaggggactggtcctctggatggctccagatgggctttatgccaaaagactctgccagagtaggatctactgggatgggcccctggcactgtgcagcgatcggcccaacaagctagaaagagaccagacttgcaagctctttgacacacagcagtttctatcagagctgcaagtgtttgctcaccatggccggccagcaccgagattccaggtgactctgtgctttggtgaggagtttccagaccctcagagacagaggaagctcatcacagctcatgtggaacctctgctagccagacaactgtattactttgctcaacaaaacactggacatttcctgaggggctacgagttacctgaacacgttaccactccagattaccaccgctccctccgtcattcttccatccaagagtga

SEQ ID NO: 52 - DNA, 39292 bp, Homo sapiens
  misc_feature (10575)..(10594): "n" at positions 10575 through 10594 can be any base.
  misc_feature (37148)..(37284): "n" at positions 37148 through 37284 can be any base.
tcctgagatcttatctttgatataagttagctccatttacacttagcagataataccaaattaaaacagagactgaattcagtgagcagagaaaacagcctagcccatggatttgttctcaatgcactgcctcctggctttggtgattttgcaaagaactgaaagaaaaagcacaacattcagaatagaaagggaatttctgaagggagtttcataactgaaatttcagtttgaactggatgagggacgctgtttagttcagtgaccactgaggacctccggcaggcttcggggtgtacaaagacagccaggattcagcccgcctcagtggagggccccacagcacaaagggaccaagaagggatagcaagaggacagccagagtgcccacaagctcggcaggaaggaggctcacatcgccgcggaagtctcgtgatggttctggtagaatcgtcctcttgaaaccttctgctgccattattgggttctgtccaatatgccttacgcaaaacactgacaatagcatacacctttccagaatgccggcacgcgctgtgcaatgcccaaactgtccctgtgagttgaatgcccctggcaggatgcgtgtccactcccgcagggccgtgggtgcctcccttgtctcactcctctgcttcaacccttcccagaactctgaaggtttgagatgaaatgactgagccacacctagtgcaggaatgagcaccagggcctctctgcaacggctgcttaagggccacaggataagcatagtgtggcacccccagttattccctgtttcgctcattggaccaccctgataggcttcagggaggcaggaacctcctctaaggcagcaggagaggggtggatggggcagccaacaggtgcatctcatgcctccgtgttctccatagggagggaggtgggctaagaggcgagtggggcagaggcctgggccagcgtgaagtgtcaggagtaaggggggagaagactggagggggcaaatccaggaggcagctgaggctgcactgtgcaaatacaagcccggttacgtctgtgtagcttagcttccccagcccacctgagccagagctgggtctgcccgtgctcccgcttctattgacatccagcaactccaaatgacctctcccatatcaatgggctcatctccgaagccgaatcttatagcctgcttctcctccccaccaggctatagtgggaaatcattgaggaaactatggttgaatgcatcgcacggcctctctggtgtctgagagaagcttcatagccagcaggctgcccctggtgggcaggtgccgcatggaggtaccacgcctcccgtgcagcgagtaagaagggcaaggagagcttgtcaggggagtgggccaggctatcacatcagatgggccaggcctcgcatcgctctctgcatcctaagcaacgtctggacttgagtgcgtgggtttgtggtactgcaatgccacagtaccttggggagcccccaggcaagccaagaaagttctgggaggccacagcccttcactcaagttcaaaggttcaaagcagggattctgtgtcacacttgcgaaggtgcccaccccaacagaagctgtggctctgcaggacacgtgcggggtagacctctaaggccttgtcccagtggaaatgccctcccacttggcctgggtagctgctcacgcttctgaaacgggaaaaatcaactgcattcctgaatgggagcctcagagcattagaaaagataatgttctgattttttaaagctaaacgtatatggaaggaagctgaaagaggacttttgatgagtcacctaatgttgatgttgaaataaacctaatgaccctctggctaaaatctgttctcatttgggaagcacctgaaccctcattctcccgccactgctctgacctctggaaagcaaggagcaaaggcacactcagcagctcccgctccaaaatgctctcccgagtcctcccaagcagccagaggacgactccacacccagaacccagagtggcctgggaaccaggcctcaggttcctggcccatttgtcatcgcccagggtcctcctgccaggaatccccccacatcctgccctgcctagagaagcccagctcttccatcaaagttctgctcaaatgtcactgcatgttacgtcttcctcacacactcccactagccttactgcatcatgcttggtttgctgagctatgtgtggggtctttccttgccaacccttctttccctgagaggtgcaatgacctcatattgaggctgtccactcccccactcccgaccccatccaccaagcctgggaggcactggcttaatgcatcatggttaaaagaaatggatggttgaattgcacagagaagacactgtgccccaggagatgtgccttgcacaagatccctgcagcacatgctgggaggctctgcccgggtagcacttaggaaagaaggatgtatgccctgggctgctgggagcactgtgggaactctgggatccccctcctcctaagggctgtgctaccctgatttggaaacaatacagaggcttctctcctgcaagaaaacatgccccctgcccacccaggatccacctggctggggaatctgcctagctggggaccaggtgggcatgctaaggaggaatggggctgtgtctgaaagaaagagatgccagcaggatccaggagagcagtcacggtcctggggtctgagagtgctgggccaaggaggtgtggggagcatagattcatataagagagagtggttcagtctgtggccatgctcctgggacacagcactgagcacccagcaaggccccaagagatgctgaaacacacagctaggatggctcccaggaacgtgagacagcattaaccacaggaagccaggcagaagtgctgcagccagggcgtgctgtgggagaagggctgggaggatgcagctcgctcgcacactgcgtcagaaaccttcacatagtgcttgtcctcagtacgagccaaggtgggggtgaggaacggcccacttaccaaaactctcagagaccccttggggaatttgtgcttcttgtttctgcaagtttccaggagacacagaaagggtgccactagactctaagctgtgggaggcctctgggaggctccttgggtggagcttagcagcaagaaggcatgttgaccttggtcatcaggaggtgtggagctgctgctatacaatggggcaggaccccggcaacccatccgggcacctcttggctctccctgtgtgtattgatggaaaatggtatgtggaggtgcagcacccctggaccaggaagggcaccgtgaccagttcaaagccctcaaggatgaaggcttgggtctggccactgagctgtagttgaaaggtgggagcatctagaaaggacagagcaggaggcgctcacgagtcttcactggcgttccagctgcaggggctgaggctggaatctgttccactaactttcctcttctaagttttctccaggataaagttgctatttgaatttcagataaacaacaagtagtttctttagtgtaagtacgtcccaaatattgcatggaatacacctatactaaaacaagttattcaatgtttatcagaaatgccaatttaactgggagttttgcatttttatttgctaaaactggcaaccctcctccagggatggaggcccactggaaccaggaggagctgccctcaggagctatgagaggaaatggatcacagcagaacgaggtgtagacttgggtggatgttgctgtgcactgcttggattcccacttgggagtgagaggttcattccctcgggtactgagactgctcctgggaggtggttctcagcaggcagccttctgtggcgatggctccagctggagaaaacgaacttcccaggtcacgtctcctctagaggcagctggcacccaatgctagctcagtcagggctgcgggggccctatcccttcactccacgctggaacaggctcgtcctagctccagagctttctgcagcattgactggagtccatttggcttggcgttgcatcacgggcacctctcggcccagttctgctcccttccccttgactccaaccaagcatgctccctaatcatacatgctgacctccatctcagagtctgccaccgtccctgttaaaggctgaaggaggactaggatcactgtcaacaaaagcatgacccaagaggcaagacacagtcatgtttatagcatattactatgagccactcactacttctagatgtcacggttcaaaggtgattgaaagaaactctgtgtttcccaatgcctgctggataaataactcagcatggatggtgagacagcatctctaacttcgcctgtctccccggtaatcgtgttcctcctcctcacttctttatcagggttcttggtaatagtagtccccccttattctcaggggatagatatgttccaaaacccctagcagatgcctgaaatagaagacagtactgagccccttatagactatgtttttttctgtacgtacatagctaggataaagtgtaacttataaattaggcacagtgagagattaacaacactaataataacaccaagcaatgatgaccatacgctgtaatgaaagctgtggatgttgttgctctctccaacatctcactgcatggcacttgccctctaatggcctgatggctgccacatggctgatgggccagcagcatatacagtggggtctgctggacaaagcagtggttcacatcccagaagggatgaagcgggaccctgcgcgatgtcaccaccctgcaaagaatggcatgcaacttcaaacacaaagtgttgatttctggaattttccatttcttattttcagactgaggttgccctcaggtaactgaaactgtggaaagggaaacggtggatacaggggactcctgtgtcattccccatcctggaaaccctccagcaacccctgactccccgaccgccccaccccctgccgagcacgtctactcagccccataactgcttgtccttccctcctctgccacccatgcacctgcccgtctgagagctctctacctcaccccgaggcctccccggcctcctggccattgttctctctcgggcggtacccacactatggccagataattcctcctttactgtagttcttaccttattacgggggaatatgagccaaagccatgtaactcgctgccgggcaggaactaacagagccagcacatgcttctcccgtacccttctctccatcaggtggccaggaatgttccggatccccgtggctttgccatggatatctcatttgaacaagaagtaaccccccccccagaatctcagggggtctcgttaccacagcataacctaacctttctagaaagatacactcctctatccagcatgcctagagtcttatgtgtgacaagtgacggtatgctgtttcacaaaatttcgctgaaagagccgttgatgaactttagaataacccaacattaggcgctgttacaaatgggtggaattagacaaagccgtttgcctttcacctcttgcttcagttttcagaaaattgcccaaaggtattgcaaaccatttgcgttttcattggcttggttaaggagttggcagtgtcaactggccctgtgtaaagccacgtcactgtttctgtagagagcatgacacgtcagagaggtgggaagtgttgccaggactcttcttagaatgctggcaagaagagcaggcgaaaagggaagagctgtttataaacagggaaaggagacatcacctcgtatccttggcttctcattacgtcatcgattacaatcacaagtctcatttcctacaagcctgaaagcgggttcttctctgcatgtaggaaaaagccccgcttactaactctgccctcaaagagatcacaagctggtcctgaacgccctgtgccctgggaatgcttactgtcgaagctctgcaaattttctcattgaaggcactcagggcattctgctaattaaattaggaaaatgtgtacagctctacttgaaaaaatccaggtttatgctctgtattctattaccaaagaatttatcacttttcaaataacattcaattattttaaactgagtgtgcagtgagagcatttataatataatctcatttccagagtgttccatcccaactcctctctggtataagtagcttagaaggttagattttttttttccagaggattaaacattcgagaagagtggctaagaggcagcaccaggtttctctcatttcctcaaagagaatttagccttgtgaagaagaataaagtgaaggtcaatggttagatccatggcttaaaaataaaatgcagctttccttactctgaatttaccataaccaaaaaggccacgaggcagccattaatgatcctaagttgcaacagaaagaaaaaaacacctacttagggttaaacgaggattcagtggtcacttgccgccggcctccacttcacaggggcggaggatgaggccagggaagactttcttacccacactgacctgaccagagatgaaactccccctcctatgacagcctgcactcagaggctgattctgaaatagtcatgccaaatgcagccaatccctgtgtacaaggagaaaaaatagttcctcagagctgtgtccttgggccagccatctggacctctcacaatctctttcgttctccctacacttgggctgaatcccgccttccttgcctgccaggtttggtttgggggccaaatgagtgaaagtccgtgagatacccctaagtattgaagtgcgtagtaaatgataatagccctgatttgttgaacatgatgatgtgccaggcattgcgcaaagcatcatttcatcatcacaacaaacactgctgggaggcagggacacccccaccctccttgtacacccagaagtaggactttggttaaatggctctcccaaggcctcacagccttaaaaactcaagcacttatttaatccccaatgatactaccttttggccatgcaatgtgtcatggccagtaattagatttgcaaacacatataaccaaagaggattagaagagacatatattctatataaattacatgaaaatagcactttcagtattttcctgattttttctggtaattaaaaatgattgccctttatatttctttatggatacagttgcattgtttttagccaattgtagcccccccctttaaagagtgaattagtgggaaaatagtgttatccaagattttaagaatctagtgtgtgtgtttgtgtgtgtaggatgggtttttctgaaatattttacttgcatgtgaatgtataattttaaagattggcttttaaaatactgaattgaggtaaattcagcttttcttgcagactctttacgataaatgtgaaattgaaaatggaaatgctccattcagatggtgtgccgactacaacctcaacatacggataattcactaaataagtaacttcctcgtggaatatcacggtcagcctttgttttgggtacacattcaatgaactggtttcctattagtttctgcttgtcaacaagttgtgtcatttactgataaatatccagccttttactaaggaataccgattttctcaagtctcagtgtgtggagggggtgggagtttggtggggaagcttttcaatttgagaacctttgccgttttttgtttcaatcgtgactaagatataaaagtccttggtcaccactgccagctgctacctgttcactgcctccctgacgggtaatgaggccatccggagttttagtgattaaaatgttttattacttgtattcacatcatcattaagaaaaataacttctagtggatcaatatggcaaatgagtaaaccagaagatggcgttgaagattagcaattacatttaaaaacaaggtagtggtgtgaaggctcagagtttcacacaacgactgttgttctgaactaaaagcagaggatgtggatgagtgaggggagggtatgttgaaaatgactaaacccggtgcagaggacacgtatacgaaagtgcaaaaagctctcatttgccattttttgtcctcagcaaactcctctctggtatgtttgtgaacgtttgagggaaaggtaacactgattaaaatataatgcaacaagaaggcaacgatctttgctttgttcactgatgtgttccaagtgcctaggacggttcctgacaagtagcaggtgctcaaaatacatttgtcaagtgaataaatctgtgaaaggaaaggaagaaaaacaggttgtgaccagaactttttgtgaacaaaaccctgttgtttattacatagactttggtaatggaaaacttacttgggtgaaataaaaaatggcatcctgttaatttctgagaacgtctgttggttttaggaaaagcatacctatccatacctcactacctgttttgctctagcctaaacatagattcttctttggttaggagacattgacccaatatataagattaaaacaaaaactgagaaataagtgaaatcaaaagcttttcaaaagttgcaggttgacctacggtggtggtggtctaaaatcatatagaaaccagagatctgatggtttacctgaaaatgcgaagtaaatgcacatactcagcatctcagacgatcgaaagctcaacgggtgaaagctcagggggttaattttgcgattaaggacatcttggaaaagtatgtaaaatccctggtccacttaagtattattcctattttgggcttttatttatttattttgagatggagtcttgctctgtcgcccatctcggctcactgcaacttcagcctcccgggttcaagcgattctcgtggctcgtcctctcaagtagctggggccacgcccggctaatttttgtatttttagtagagatggggtttcaccgtgttggccaggctggtctcgaactcctgacctcaggcgatccaccgcctcggcctcccaaagtgctgggattacaggcttgagccacagcgcctggcctattttgggcttttataccccactggtaaactgctttcctccaggttgaggttaaaacgacatcattttaaggtgaactgaagtctggaagtgattaagcacttggatccttagggagcctctccccgcccccatctctttcatgctaagataattaaaacttcggggccggggcattgtctgagtcacttcaattcaccagcctaatagatgcaaaaggatgtaagcatgtcagacacgcagagacagtatttgaatcaagcttaatagctcaagggagctgggccatttcctattttctttttagtgagtgcgatgttctctaaacaccgcggagaggcagggttcccggtgatggccttgccgagggtgctcccgcaacctccacctccagttctctttggaccattcctccgtcttccgttacacgctctgcaaagcgaagtccccttcgcaccagattcccgctactacacgccccccatttcccgccctggccacatcgctgcagtttagtgattgactggcctcctgaggtcctggcgcaaaggcgagattcgcatttcgcacctcgcccttcgcgggaaacggccccagtgacagtccccgaagcggcgcgcgcccggctggaggtgcgctctccgggcgcggcgcgcggagggtcgccaagggcgcgggaaccccaccccggccgcggcagcccccagccttcacgccggccctgaggctcgcccgcccggccggccccggctctcggcttgcaaagtccctctccccagtccaacccccggcccccacaggcctcggcgccccgccccgccccaggccccgccccagagagttctataaagttcctctttcccacctcgcactctcagtttcaccgctcgatcttgggacccaccgctgccctcagctccgagtccagggcgaggtaagggctggagtcgggcaggaggaggggtgtgaggctgataccagagaggacccggagcgcgaaccagaggttcgacctccagggcagcgcagggtaccccggcttcggagcgggaagggagcgcgccccgtcctggagctccgactcccaccccatctgcgctgagccggaggcgcgggtttgggctccaaggcccgcctccttggctctgcccgagcctccccgcctgccctccgcgctcctgcgacggggtcgccacaagctggacgggatgagctaaccggactgtcggggccccaggagtggctgaggcggggccgtccaaggcacccacacaagacggcacaactgcctgcgagaaacaggcccggccctgtggaccccaatcctaggctccttcccctgctcttcgttcctaaggggcccaagctcacggcggcctccggcgcggtgctcacccgctggcgcaggaggaggaggagctccacatttgggtcgctccgagccttgcgtgcggtggcnnnnnnnnnnnnnnnnnnnnctccggggtccggcggacgctctgcgcgcggaatcccccgtactggggctgcagcccccgcgtctgcgccacttgtcgtttgcagagcccacttagtgcgcgctagctgggcagggataggggtcctattcggggcgaagggtctggatgcgagcagagaaagcggagggtggaggaacccggggctgcgcccctggaacgcccggccgcaggcgaggtcctccgcgcgtggaggccgccaggggagtggaaactgacagagtcgcgggaaggggcgagaagcgggttgggagtgagcgaaggcaagcgagagctgcgagtgagtgcggaaggagggccaggaggggtggcggctgggtggggagagagggtgcaagacgagcggcgcgtgtcgggagcctttgggctgcgggtgcgttacaggagagcaggcgggtaggagccttcgcgggggccgagctcggaaggcggacggctgtgcccgcccaggggatgcgcccgggccggccgcgaaggtgccttcttccgggggcccggacgaccctgacacggcacgcgcgcgcttcgcagcctcaaagactccggggcctcgtggtcactggcgcaggggatcggggcggggtgcccggagtgcggtgcctcgtggctgaagggcagctcttctccccgcagtgcagagcagagcgggcggaggaccccgggcgcgggcgcggacggcacgcggggcatgaacctggagggcggcggccgaggcggagagttcggcatgagcgcggtgagctgcggcaacgggaagctccgccagtggctgatcgaccagatcgacagcggcaagtaccccgggctggtgtgggagaacgaggagaagagcatcttccgcatcccctggaagcacgcgggcaagcaggactacaaccgcgaggaggacgccgcgctcttcaaggtctccggcctcgggagccggcgggggcgcgccggggagggcccagagacagagcccggggtccccggcgccgcctccgaggcgagcccaggggaccgcgcggggcggacgggcgggcggcggaggcatcaggtggcgtcgccggagccgcaggaggaggaaaggaggcctcggctctcagcgggaccgcgggggccgggagccgggtcctgggcgcgtggaggctgcagggaaaccgctgaaggcccggccgggcccggggaagggcggccaaaggcttgaggggttttgcgcgttcgtccgtgcgttctcgtttccacgcaagcctcccgcccttcctccgggctcccgtctgccgcctccgtccgtgggtccccctcgccctctccgtgcgtccgcgcctgtgccggcggctgttttcgtctctcaccgcgtctctgtttctcttttcgctgcttttctctctgagtctctctctctccatgtttttcctgaggtcagcctctcttctcgctcctgctagctctctgcgggtactcccacctctgtctttctctttgtgtgtctctgtctctctctttcccccatcgcagtggaactcagggcctctgtctagagctgtctcccttgccctttgcgcgagtgcacacacgtgtgtcgttgttacgattgttctcccctaaggcagtttacccagagaactacgtgtctgggcccagcccccacctgtgggcagagcaggggaaggggacttcctccgggaatttggtctcaatttgctctcagagtgcctcagctgtgctgccatccagatgtctcctgtgggtgacagctcacaccacagctgtccttagtcctaggcaagctcactcagacactgggtgggtagagccccctgaaggaacctccgcatctcactctaccggttataaatacccagaaaatgtgtcttcaacttggcagtgatagggtccaagatggaaaatcattttcctagagcatagctggggtctttcagtttacgttctgagcaacggtgtaaatctgaaggacctatgcgccattctttcttttagaaatacaatttcaagattccttataaaatatctgtattttgggtttagcatggtggctcacacctgtaatcccagcactttgggaagatgaggtggaaggatgcctatgcaacatagtgagaccctgcctctgcaaaaaataataattaaaaaaattagccaggcatggtggtgaacacctgtaggccgagggcccagctactctagaggctgagataggaggaccctagaactcaggagttcgatgctgcggtgagctatcatcgtgccactgtactctagcctgggcagcagagcaggactctgattccaaaaagaaagctaataaaccagacatgtattttgacttttcgttctcttcattctttcccaccaggcttgggcactgtttaaaggaaagttccgagaaggcatcgacaagccggaccctcccacctggaagacgcgcctgcggtgcgctttgaacaagagcaatgactttgaggaactggttgagcggagccagctggacatctcagacccgtacaaagtgtacaggattgttcctgagggagccaaaaaaggtaggggctctcctgaatttgggtcacctaacagaggcagccagatccttgaggcaccttaacttcattctgagcatcactttctagctttccttttgtattgcctgcctgcctgccttctgcctcacagtgaagcccagcctccttgcctgagttatgtgggtcacaagttgaaattcctgtggggttcagcataggagaattaatcacactgtatgcctcaatgtatatgggggggggtgcattgaatatgtgttttccagttagtctttcaaaaaaaaaaagaaaaaagaaaactggataacttgttaaaatttacttatctaatagtctttagtgagtgactattttgcagaaaaggagtaatgagaggaatatctcatcactatgcatggtaataaaactgtcaacttttaaagtgtaacatggtcagctgaggtgtttattaaaagtcagattcctggacccctcttttcaagattctgaccagtgtgtctggaagagagctcaggaatctgcatctggaacaaatccttcaggtgacctcacttgggaaacatctggctggcggggtcctttatgtcacaaggcacattcgcatgccatctgtcatgtatttctttacctgtcctgtacaactcagaccttgtagaaaaaaatcagtttaatagcatgaaaaaataacttcccaagggagttgctgaaaaataccttatttgtcaacaccgtgttatgcattctaagaattaaatgctcaggtatttttacaagatttgacatttagttaggtcagttcctgtttttacgttgtgccatttcccttttccccaaacatgtaggagccaagcagctcaccctggaggacccgcagatgtccatgagccacccctacaccatgacaacgccttacccttcgctcccagcccaggtatggtggagggcactgggctccctgagggcgaggctgtgtgggccagctgcccacatggccagagaaccacagcagcccagacagcagaacttgccatttgctatggctgctccaacagcccagaaaaaccccaggtcactgaacgaatgtctcactttccacacggtgctgccattggtgtggattttaagttggggagggtcgggcgtgtccgcctgttggaatatgcttctcaggtcttctgggaaacagatgttttgtggaagtggaagattttggaagtagtgccttatcatgtgaaaccacagggcagctgatctcttcaggctttcttgatgtgaatgacagctttgtttcatccactttggtgggtaaaagaaggcaaattcccctgtggtacttttggtgccaggtttagccatatgacgaagctttacataaaacagtacaagtatctccattgtcctttatgatcctccatgagtgttttcacttagtctgatgaagggttcactccagtcttttcggatgataaaatgcttcggctgtcagtctaataagggattccctgaggagtttggaggctgtaagagcaccccccgtctcaatgccagtgcttcttatctcagcctctcctgcactcctttacccccgtctcgatgccagtgcttcttatctcagcctctcctgcactcctttacccccgtctcaatgccagtgcttcctatctcagcctctcctgcactcctttacccccgtctcgatgccagtgcttcttatctcagcctctcctgcactcctttacccccgtctcaatgccagtgcttcctatctcagcctctcctgcactcctttacccccgtctcaatgccagtgcttcctatctcagcctctcctgcactcctttacccccgtctcgatgccagtgcttcttatctcagcctctcctgcactcctttacccccgtctcgatgccagtgcttcttatctcagcctctcctgcactcctttacccccgtctcaatgccagtgcttcctatctcagcctccccgtctcaatgccagtgcttcttatctcagcctctcctgcactcctttagcaggttcacaactacatgatgccacccctcgaccgaagctggagggactacgtcccggatcagccacacccggaaatcccgtaccaatgtcccatgacgtttggaccccgcggccaccactggcaaggcccagcttgtgaaaatggtaaggaggataccagtgcaggaaatagaagagctaactgctaatgtggccatgggccatggcgaatcctggtctgtcctgggcagcaccaaagctctttccccttcttagaggctgcgtgtgcagctcggggagaggggggttttctcactcctgtgggatggtggcatcccacagccaagtttactctcaggatccatgctaggcactgcccttcgtgggatcttatttaaacaccacagagatcactccaggcagtggaaaacagccccccactttttatatagagaggagattgtggaagctcataaataataagtagggatgctgggagattattgagctggtatatttctctcgaatagtggtgtgttcattgttgctattgttggaattagaggtgatactaaaaaaggaacggaaaaataccatggcaaacacataaaacgtctctacaggtgcctacctaccactgggtcccagaaagacttgctgattgtggattagatgtggtcccctgccctcgggagttccccagacatcaaaatgagctccctcagcagaagctctcattagctgggtgcagggagaatctagcaatgcggtaactcaggccttcaggacttttgagttagttacttaaatggaagtcctgagacaggtcaacacactgaaccctttggatgttttaggaatatttgttcctttgcaatttggcctttttttccccagtcatgttcaggttatccttggctgcaggtagtgaagaggtgtaccactctttaatgtttgtactgagtggcatgttcacaaaaaagctcagaattcagttgcattggcttttcaagagggatttgcagcaagggctggtttccaatatggtagtggaggaattggctaacataaaactagctcctgaaattcagacttgcgtttactgctctggctctatggaattagtaaccatgggaaagaggcaatgcttagaattgtgtaaagtgatggagtaggtagagacctgtcttgaagcatcggtaacagtaaatgaagcagcagcaagatcaggtgttctgtgccacattctttttccattcatgtttcatacaacattgtcttcaggaacatggttcagtgttctcccaacccacaagagacaagcaaaataaaaatggactaaataatttgctagtttttaattgggctctttggcacagactcaagtagacctgaactctcagctctgttgtgaacccgctttgtgaacaaggacaaagcatgtcatctgtctctgagcctcagtctccctgttagtcagttacagagagagcgctccaagtttccttccaaagctgtgcactggctcgtttctccatcagctttggttttccagttggtctccagctcatctttgcctcacaagagcgtgccctgctagttgctggtgctgggagtgggtgggaaggtgattgggcgccagccccttccttcccaggcttcacacacacaccccaggaagccccgcggtgcgtcggactctctgtctagacatcatctgatttttatttgcaaatgcaggttgccaggtgacaggaaccttttatgcttgtgccccacctgagtcccaggctcccggagtccccacagagccaagcataaggtctgccgaagccttggcgttctcaggtgagtgcagggtttgctcctggaggcaccgcaggaggccagcctctgctgccagctctgtcatctttgggcagattcgatgggactttagacacttgctttgctccctctggggtctggagtagatgtagacacatcctgtgtgtgaggtgaccagggtgatttaggagcaccattagaaaacctgacatcactgcttgtggttctgctgaccgtttcagccactggcttgaatggagtcattttggcttcttcactggcacctctctgaatttctaggaatgtgcctttacctttaccgagggcccctcttcagccaacattctcacgatgtggaataattgcttggaagtgtagaagggcttctcattttgagaagctgatcatccttccaggttgagccacaaataagtcctcctcctctactccctggggacattagttctggtccctcatctctaaaacattgatgtgcctaagagtaatacacattttggtcttcctctgaactttaatatagcttgcaaacaaatatggattcaatctgatttttaaagttttatttctaaaaaaaaaaaaaaaaatccctgcaccatggagatcttacctactataaagaaggcacctctaggcttggcaagcacacgtgctatatgtatatttatttttcagataatattttggattgtttttaaatgggatttgtttttatattaaaaccaaatagcttaaggtttggaattctcatcttgccctctggcatctttaaaaatcagtgatgaaaaatactaactaaattctgaaggtttcagggaggcgagagttgtggcacttttgctgctcagaggggagctggagtttgacctaccagctctttctagttgtgaatgaggcttgcacctttttttctgaggtgctcgtgagtaactgaggatgccctttgggaggaggtgcttctgagcaggaaggcttgtgtttgtttttagaaactttcaaacccttgtcttgaacacctaagacttgtgtgggtgcctgaagagtaggaaataaacagctatttatatctcggcaacctcgtgatttctgatgacattaaatgaaatgaaacctgccccgagaatcacctcgaatggccaacacccactctctttggggcgcactgtctgactcgctttcagacagtgtgttgaagcagagaattgagacagtgatgtgggttaagtctcaaaacctgctgttgaggaataagatagttttgtgggtttctttttttggtatgcatgatacagattaattatcagccatgagcacatttattagataactgtgattcccattgattttggggttccatacagttaccagtggcagctgcctcctgtctgtgccactcccctgcggtctggctgaggagcttgtgcaaacccagcttggttctttcaactcatgggcgatattttaaagaggcttctgaaatcagcaaaacgtttgtaaatggattcatcttgtttaaagtttcagagagcgcagttttagagttcttttcaaacttaaacacaaagcccagtgggaatttcagcagactttacatgaacttttagagtatttttctcattaatttctttcttttcacaagaattaattttgtgataaaaacaccacatatccagtgtggaaaactaatttaaaaatcagaaaaacaaaaatggaaaataaaaacatcacattctaccacccagaaatcaccattaaggcctcagtgcttaccctttaatgtgtgtatgtgagtgtgtttatatataaattatatagacataaataattaagcacctaattctatatataatttatatatgtacacacacacacacacacacacatttgctttttacctaaatgatgtcatgttattattttggggacgtttcaggtatgtggaccgacttgcttctttctgaaacaccgttatattttttgctagtataaattaaacttagggttcatttcctccaaagtaaaaattgatttgcttaaagatgaattttcattcagtgacacatgacttaaatgacatcaccactatcatcatcataattcacaaataagacttagcaagttcttaatagtgatgctctataataggaattcaacttacatttccagaaaattaatgaaagatacacttgttccttaaaaaaagagtcggtggccacatacgtttgtaatatgctggtttagacagattaaatgggtttctttccacgggacttctccaagtgttgaccgagctcatgctgtctgtggatctctgggggagacaagggcacgctgtgtttcccaggcctccttgacgcgggaaccttttgttcccccacgggacatgtgggacactagagttccaccacaggtgcttggctctgtggagtcgttggcctcgaggtggtgtccttggcccccagcactgactccggagctctgtgtttgcagactgccggctgcacatctgcctgtactaccgggaaatcctcgtgaaggagctgaccacgtccagccccgagggctgccggatctcccatggacatacgtatgacgccagcaacctggaccaggtcctgttcccctacccagaggacaatggccagaggaaaaacattgagaagctgctgagccacctggagaggggcgtggtcctctggatggcccccgacgggctctatgcgaaaagactgtgccagagcaggatctactgggacgggcccctggcgctgtgcaacgaccggcccaacaaactggagagagaccagacctgcaagctctttgacacacagcagttcttgtcaggtaaggcacctcgttatctgttagaatggaggtggtgatggcctgcctgccacaggggtcagaaaccacagggtccctcccaccccaggctgaggtcttcctcctgttgacttcggcgcccactgggcttggggcttgactccagtagagatcttctgtctggctctgttgtgggcagagagtccggatcagatggtccaggtggaccatggctcaggctgttctcttgcaattctggttttcagcagtcgcctcttaaaacagttccatttcattgcactatgatctcgacaaatacgtctgctgatgtggcggctcttttcaggttcccagaaaaatcataaaggttggaagcatattgttaacattcttggttgtcaggtgtgtcaccctcatgcagatgctggcccacgagtgagacggagggtggagtggactgtactggttttgcacaggagaagttataggagagtgctataagttggctctgtgatatgaacatttctaagcatatttttcagaaccagtgagttttgtttttctaccttggatttcatgacaattcagcgaacctctggctggcttctgtgaagcccctcgccctgtcatgctgggcttcctcactggctttgtggggctgtccaggtggagggagcctcccgcgtgggagggagctgctctacccgccactcgccaccccaccgccaactcttcctctgccttttcccagtcctgtcccttcctgagccccttcagaaactcctgtgtctttgatttctcatgtgcctccccttttcttgaatgtgcttcttcattcaacttatttaaaataaaaatatgacacgtctgtgtgctctggcactgttgacatgtgctcgtacttctgggtgtaagtgacccaagtttttgtaagctcatccagattttcttttggtgcccaaagcaaatatgtccccagataactaagcttcaggccaggtgtggtggcccatgcctgtaatcccagcactttaggaggctgaggtgggcagatcacttgaggccaggagttcaagaccagcctggccaacatggcaaaaccccgtctctactaaagatacaaaaattagctgggcgtgatggtgggcgcctgtaatcccagctactcaggaggatgaggcacaagaatcgcttgaacctgtgggaggcggaggttgcagtgagctgagatcgcaccacggtgctgcagtttgcaggacagagcgagactccattgccccccgcaccacaaaaaaataactaagctcacacagaggctgaccataggaagagggagaactgtgctggttccccgaggcggcggcaagtgaggaagtcacctggggctggacacctctcattctaagggcagaaccatccccaagccctggccagggcggtcccatccttcttggggttgggcatggtgttcatgggggaccaaggaaattgaagggcaactggggggaccccccctcccctgtcagcatctcctgtgtctgccttgggatctggaagagctcacatgggccaggaaggctaaggcccactgggcctggatttctgaagactctggaccttggtgccagtggattcagaagataccacaaggtgagggctttctaatgaaagtgtcacaaggaactggcactggcttttctgagtgcctcttgctgggcgtttttagggaggtagagcccccgtggtgactaagctggaaggtgcacattgagtcacaggtgcactgcgtgagagacagcacaggcagggggtggacgcctgtgagtgtcctggggctgtagacttgcacgactagaacttactattaatctgtgagcaagagctggtcttggctttcattccttcctctgtaaccaagggctgtgctctttgcccactgcagcctctcacctcaaagtgttcactgaggttcaaggaggatgctgtgaacgtaaaaactgcagctgtgccaaccagcttctgcataattaaggattcccaccaaacactctcatgttatctagggttggagccatgctttctcagagaattgtgccaactcgccattctgattagcctgtgtaggtgtagtctcagatcacggcagtgtgaatgtattttacagattctgactaagtcatttgggtttgatttgaattctggaaaaaaaaaaaagcaggaagtcaaatagtcctgtaagttagctagaaacttctgttcagttgaagagaacagtggagatctttgatatcttcctattcaggtctgcacagcactagggacagcccccagggcccggcccgagggtgtgtatctgataaggacgcgtctgttctgcagaagctgtagcggctcctgtgtcaactcgtttcttttgcgggcgtgacattttattgtagctacaggcagaagatttgtcttgtgtacaggggagggagcatgggctaaagtcaggggatgggcacttgtctttccaacaatgttccagtccgttttgtatcttttgggtaggtgtggtggcttcaggatgtacatgtgtatatccacaagcgggaggccaggggggctgccccactcctgttctcaagtcaagttactgttccatccctggagacaggcaagaagtctactcagagttacacagttcaggcatagtgacagtgggactcagctgccgatggctggtgctcagtcaccacgttgacgttacatattttctgtggtgcctgagttacgtggatgtccgcagtagcacagatactggattatgtgggctctgtagtgaggggatgaggttttaaaatgatcctgggatgtcgaaacattctgattttttaaatgaaaacttgtccatggcataaattggtcttttgccattgcgtgactacgtttcttgttctttatctcccgacttcactgtggtctactaccttttgaatcttcgtgggtccaatgctgcaaagcagtgttctttagctgtcgactagttcctcttgaagaatcgagggagaccgagggccctggggggaaagcacccaaaggaatgcatacatgctattttgtatctgagatgttcacatcaagagccccactcagcggagtaagagtgctcattcctcttgcagtgttcagaatcacagtaagctcttgcttcctgtttaacctggtgtgttcggtgatgagggtttctgaacatggtctctttcttgtgggcttctacagagctgcaagcgtttgctcaccacggccgctccctgccaagattccaggtgactctatgctttggagaggagtttccagaccctcagaggcaaagaaagctcatcacagctcacgtgagtcctcagttacactcctaccatagtggcttcctgttctttgtaaaggccagagtttcatttagaaaagtcccaaatgaaaagtaaatgtcaaatgacctggaaaaataagcgtaacccttaaactagtgagggaggaagcatggtccaacgagcagcacagtctgaggactcacgtgctcctcccagacttgagatctgctcatcaaagaaccagggaggacagcctcaaaggagggtgcctctttccccatcttttttatttttcaggaaagttgtcgtatttccattttatagggattgaaaaagattgatggttaaagttgccctttaaaattctccaggttaagattgctgtaagaatgctatctagctagtggatcttcattcaatggaaaagcttttcccaaatgagaaactatccattccctggaggcattttgtaggtctctgcagctgtgtcctagcacctcttttatttctggaattttagaaattatttaattattgggcatatgatatttgaaagaggctgaatctttcaaggaattcaagcaaatcagaccctctcgtaatgttctctagcatagctcaagatgggttcaactgtggcaagtaacactaaaagggtagggttaggattagggttagagttttcttttttatgagaaaaggtttccatagataacatgaagcattaatttgccatgggaaacagaatcttgaacccttaagacttttgaatttgaaaacttcacattgctacatacttgcaagcattattaacgggcttgcatgctgagcaataccaggtaaaagttacaccccctaacatcaaagttctcatcatgttctagctctgatgctatttctcattgagaactgaaatgaaacatggtttaatcttgaacatacaaccccccttcttgattttaaaaacaaagaccagccaaccaaccagtatataatcccatagactcaggagttttctcatgagttctctccagtgattgacttaataattgatatgattgttgaaataataactgatacattgttaacaacaggaattgctaaatgactaaataaacttggcattgataagcagcatttaagaagttgatgatcggccgggcacagtggctcacgcctgtaatcccggcactttgggaggctgaggcgggcagatcatgtggtcaggagttcgagaccagcctgaccaacatggtgaaaccccctctctactaaaaatacaaaaattagccgggcgtggtggtgcgcacctgtaatcccagctactcgggaggctgaagcaagggagtcacttgaacccaggagtcagagcttgcagtgagccgagattgcaccactgcactccagcctgggtgacagagtgagactctgtctcaaaaaaaaaacaaaaaaagaagttgatgatcagctcagctatcacatcaatccagttttaaagttgacatggatgcaagtcactgtcctctaagtcagggaaagatggatccccagatgaccccctcatgctgaagacgaggctgcgtggtccataaaatgaataaacacacgtgtacacctatgagttccacttttaaaaattattaatttaattcatttcaggtacttaggagtttagcttaagtcgtcatatataaaatacagtctctaatatcatgattgatggagagcattcagcttgccttagatgctgtaaattcaggaaaagctgaacattaaggcgtttttgttttttggtgagtgtgatccacgctaataaccagacagtataaatttgaggccagttagcttctctttttccacaatagtagttttgttgttgtttaactttactttttatttcttttacctctggttgagaactatacagattacctagaaatcaaatcattcaggatgagctccttgtttctttcaaactgcagttgtggaaaaacaaaatcattggcctaaattaccctgcagattccctcagacttccttttaatttgatcactttacttgatttgatgcagttttagttaaatgtacattttaagtggcagtcgatttgaaagtaacatctttaacccagaattaagtcactttggctgtttttttacatgttgatctatggaaggactaaccaaaaaattgcttctttagatggctccaaatatgaaatgttttgatgtgttctaggatgtaactttgggctttacgttactgtctccttagaatctgagtgctgtttaatagtgagccagttgcaggatatctcagtaatgtctttttaaaatctcttattaaaggtagaacctctgctagccagacaactatattattttgctcaacaaaacagtggacatttcctgaggggctacgatttaccagaacacatcagcaatccagaagattaccacagatctatccgccattcctctattcaagaatgaaaaatgtcaagatgagtggttttctttttcctttttttttttttttttttgatacggggatacggggtcttgctctgtctcccaggctggagtgcagtgacacaatctcagctcactgtgacctccgcctcctgggttcaagagactctcctgcctcagcctccctggtagctgggattacaggtgtgagccactgcacccacccaagacaagtgattttcattgtaaatatttgactttagtgaaagcgtccaattgactgccctcttactgttttgaggaactcagaagtggagatttcagttcagcggttgaggagaattgcggcgagacaagcatggaaaatcagtgacatctgattggcagatgagcttatttcaaaaggaagggtggctttgcatttcttgtgttctatagactgccatcattgatgatcactgtgaaaattgaccaagtgatgtgtttacatttactgaaatgcgctctttaatttgttgtagattaggtcttgctggaagacagagaaaacttgcctttcagtattgacactgactagagtgatgactgcttgtaggtatgtctgtgccatttctcagggaagtaagatgtaaattgaagaagcctcacacgtaaaagaaatgtattaacgtatgtaggagctgcagttcttgtggaagacacttgctgagtgaaggaaatgaatctttgactgaagccgtgcctgtagccttggggaggcccatcccccacctgccagcggtttcctggtgtgggtccctctgccccaccctccttcccattggctttctctccttggcctttcctggaagccagttagtaaacttcctattttcttgagtcaaaaaacatgagcgctactcttggatgggacatttttgtctgtcctacaatctagtaatgtctaagtaatggttaagttttcttgtttctgcatctttttgaccctcattctttagagatgctaaaattcttcgcataaagaagaagaaattaaggaacataaatcttaatacttgaactgttgcccttctgtccaagtacttaactatctgttcccttcctctgtgccacgctcctctgtttgtttggctgtccagcgatcagccatggcgacactaaaggaggaggagccggggactcccaggctggagagcactgccaggacccaccactggaagcaggatggagctgactacggaactgcacactcagtgggctgtttctgcttatttcatctgttctatgcttcctcgtgccaattatagtttgacagggccttaaaattacttggctttttccaaatgcttctatttatagaatcccaaagacctccacttgcttaagtatacctatcacttacatttttgtggttttgagaaagtacagcagtagactggggcgtcacctccaggccgtttctcatactacaggatatttactattactcccaggatcagcagaagattgcgtagctctcaaatgtgtgttcctgcttttctaatggatattttaaattcattcaacaagcacctagtaagtgcctgctgtatccctacattacacagttcagcctttatcaagcttagtgagcagtgagcactgaaacattattttttaatgtttaaaaagtttctaatattaaagtcagaatattaatacaattaatattaatattaactacagaaaagacaaacagtagagaacagcaaaaaaataaaaaggatctccttttttcccagcccaaattctcctctctaaaagtgtccacaagaaggggtgtttattcttccaacacatttcacttttctgtaaatatacataaacttaaaaagaaaacctcatggagtcatcttgcacacactttcatgcagtgctctttgtagctaacagtgaagatttacctcgttctgctcagaggccttgctgtggagctccactgccatgtacccagtagggtttgacatttcattagccatgcaacatggatatgtattgggcagcagactgtgtttcgtgaactgcagtgatgtatacatcttatagatgcaaagtattttggggtatattatcctaagggaagataaagatgatattaagaactgctgtttcacggggcccttacctgtgaccctctttgctgaagaatatttaaccccacacagcacttcaaagaagctgtcttggaagtctgtctcaggagcaccctgtcttcttaattctccaagcggatgctccatttcaattgctttgtgacttcttcttctttgtttttttaaatattatgctgctttaacagtggagctgaattttctggaaaatgcttcttggctggggccactacctcctttcctatctttacatctatgtgtatgttgactttttaaaattctgagtgatccagggtatgacctagggaatgaactagctatgaaatactcagggttaggaatcctagcacttgtctcaggactctgaaaaggaacggcttcctcattccttgtcttgataaagtggaattggcaaactagaatttagtttgtactcagtggacagtgctgttgaagatttgaggacttgttaaagagcactgggtcatatggaaaaaatgtatgtgtctcccaggtgcatttcttggtttatgtcttgttcttgagattttgtatatttaggaaaacctcaagcagtaattaatatctcctggaacactatagagaaccaagtgaccgactcatttacaactgaaacctaggaagcccctgagtcctgagcgaaaacaggagagttagtcgccctacagaaaacccagctagactattgggtatgaactaaaaagagactgtgccatggtgagaaaaatgtaaaatcctacagtgaaatgagcagcccttacagtattgttaccaccaagggcaggtaggtattagtgtttgaaaaagctggtctttgagcgagggcataaatacagctagccccaggggtggaacaactctgggagtcttgggtactcgcacctcttggctttgttgatgctccgccaggaaggccacttgtgtgtgcgtgtcagttacttttttagtaacaattcagatccagtgtaaacttccgttcattgctctccagtcacatgcccccacttccccacaggtgaaagtttttctgaaagtgttgggattggttaaggtctttatttgtattacgtatctcccgaagtcctctgtggccagctgcatctgtctgaatggtgcgtgaaggctctcagaccttacacaccattttgtaagttatgttttacatgccccgtttttgagactgatctcgatgcaggtggatctccttgagatcctgatagcctgttacaggaatgaagtaaaggtcagtttttttttgtattgattttcacagctttgaggaacatgcataagaaatgtagctgaagtagaggggacgtgagagaagggccaggccggcaggccaaccctcctccaatggaaattcccgtgttgcttcaaactgagacagatgggacttaacaggcaatggggtccacttccccctcttcagcatcccccgtaccccactttctgctgaaagaactgccagcaggtaggaccccagaggcccccaaatgaaagcttgaatttcccctactggctctgcgttttgctgagatctgtaggaaaggatgcttcacaaactgaggtagataatgctatgctgtcgttggtatacatcatgaatttttatgtaaattgctctgcaaagcaaattgatatgtttgataaatttatgtttttaggtaaataaaaacttttaaaaatttgttatggaatgtgtgtgtgtgttattaaacatgcatcctgatagcttttaaagcactttctcctgcggttacgttccttcagagaggctgctgtacgtgtctctgaaatcagatctccaagtgttcaccttgttaaagagacaaacgctggccaagtgccgggctgctcctcccacacagaggagtgtctgtgaagagtaatcatcctgctctcccgttagcatctgcctcctcttcctttatctgtactttaaaaggtttagggctttcaaggaagttgtttttaatgttttcttttgtttatattcgaagctcctctgattttggtcattgctaaaaagaagggatataggttaactaacactccaaatgtgaaaatcaaatggaaaactggataaagagaacaggatttagatggaacccctggggatccgtacgtctgctgttgacctcagctccaaactcttcctctctctgagcagccaggcaagggagtctcctttctcagcttcatcgcttctactgattacatggctcagctcctatgcacctactaacttccagtccagcagaaaaactcaaagaaccaggctgcagctgctggtgctaaaatccttgcagctgaaggttacatagagctgtcagaaaagtttgtagtttggatctagaaccccccctagaatagtagattagcataattttgattttgctaaatggtaaaatttcttttctaaaccctcacaagttcagttgagaaactttcctgaaaacaaagatcaataaatcttagcatagtgataagacaaaggagacagcagctccagtgttttaaaaggggacaaaaatgagagaaggtagtaaaatctgttcccagattccactgctgccttcgctgttcccaggaaggaaggatttatgtcctgatctcaggagacaggcttcagcagagtgcttccctgtgagttctgtgttcctaacttaacaattctcaatattttggggagaaatattttggtttccttcagtccccccttgaagctttactttcagaaagtttcacatgttaaaagctaagttggtagttttggagagatttgggttagaagttttaagataagagatttggcaaaggaggaggagaacatagtttggaacaagcagaaaggaaccaatttgggtacattgttccatctcttattgtatcagtctttcagtcctgaaaataggtcagttccgttaaatcattgcatcccatttcagaggtggtgtaagtgggcttccataagagttacgtcttccatatggtgtaggcacacaggtactttatcagagacatttgtatggaaataaaaagaaaacaaaggtctatgtttcaagcagtctataagctagtttctggagagcaaccagctgagatttctagatttgggttcaaataattttaagttggagtggacaggcagtggcaatctgacagatttttctggattatagtttgcatcagacgttccagtgaagtttttgtccataaataaattgtgatgacttctccaaagtttatatcaagttgttcagctttcatttgcagggcttcaggaaaggcacggttttaattcctagtgatttcaagtcagaaaggtgggagaaagttgggaatgttagtctgaagagccatagcagatattagaggaaactaaaacttcaggattcagtccagataatttttaaaaactctaaaacaatggacagggctagaatctaataacagctatgctatagctgttctgaaacattttttctctctacagtcacctccctgtttaccaaagataatcacaataagtccagtttacttacaaaacaagtttagtgtcattatatttaaccggatcatttacataagtacagcaagaacagtgatttaacatataagctctttttaagtcagcgttgctggaacttttcgtaaagaattttattagattagaacactaaaaccctcttcagactaggaagccgtgccacagacttaccaacagattttatctgagatacctgggtaaatttttttcttgaggtctccaaaatgttttgaggttcctgggcttgtcagaaaatgacattatttacttactgcaaggctagaagtgctggaagggcaccgcatagttcaggaacaaagtgccaggccagttctttcaagggttttattggctccttaaagttaacgttcattccttaaagcagtctggtcacatctgaaaaaatgacgtcccagtcatagccttgatgatataacctgtgtttccaatttttccagtccgaagagaccagattcctagtgaacttatgcaaataactatcttgccataaaaatagaatttctcacatacagtttctaaatcctggagggctcaggtaaagaaaaagataaatgtttcaatatttgtgcacaaaaatatactttacaaaattactgtaaagctgtagattacttaagagggaaaaaaagttttctcaactatggaaagaaaacataaaaagaatcagcaatgctttaaacaaaaaatgttgcaaaaaatcattttagtccttccttggtttagtttcgtgtaattcttgttttgcttgatttggggttactaattttatgagtccagtttttttttcattagcattctgggaatttttaatgactccaataatatggtctgaaagttgtcaggaacctgtattcaagagtacttctttcagtcctttctatgaaccttcttgaagacataacactttaggatctgcaaagagcttttagaaaaagtatcataataaagcaattaatagcagataacaagacttaaaatggacatagttaaagacacaattgacatggaaatttggttactttctgtggcttacaacaatttaacataatacccataattataactgacaacattaccaaaacatatcagatttttaggaatctcatacaattttagaacacatattaataacatatccatatgatatagtttggatctgagtccccacccaaatctcatgttgaaatgtaatccccaatgccagaggagaggcctggtagaaggtgactggatcattggggtggtccctcatgagtggtttagcaccatcctctcagtactgctctcatgatggtgagtgagtgctctcaagatctggttatttaaaagtgtgtagcacctcccccacttcctccttctgctcctgccatataagatatgcttggttccccttcaccatccactatgattgtatgtttactgaggccttcccagaagccaagcagatgctgccatgcttcctgtacagctggcagaactgtgagctaattaaacctcttttctttataaattacccagtctcaggtatttatttatgaagtgcaagaatggagtaatatagaaaattggtaccagtagtgggatattgtgataaagatacctgaaaatgtggaagtgggtttggaactggataacagacagagattggaagagtgtggaggctcagaagaagacaggaagataagggaaaatttggaactcccgaaggacttgctgaatgattgtgaccaaaatgctgatagtgatatagacaatgaaggccaggctgaggaggtctcagatggaaatgaggaacttattgggaactggagtaatggtcgctttcgttacgcattagcaaagagcctctactctaaagatttgtggaactttgaacttgggagcaatgatttagggtatttggcagaagaaacttctaagcagtgaagtgtttaagatgtgacctggctgcttctaacagcttatgcttatatgtgtgaacaaagaaataacctgaaactggaacttatatttaaaatggaagcagagcataaaagtttgaaaaatttgcagcctggtcatgtgataaagaaaggaaaatttcactagcacctctatctagggtctcaggttctcatctgacaaagtacacaaaggccttacaaccccatgtgtccatagatagaagaataaaaaaagacagtctgtaagagaggaaatcaaaagctgttcatggtagtagaaaggattaccaatgggtaccacaaaaagtcaagactcatataaataattaaaaacaaggcatttacactaatttgtataaatgtttctctcccaagctaaggtatttactaaggaaatcaatttggtggtgggtctaaagaactttatttaactctgtgtcaaatccaatctctgcttgaatgctgcttaattaattccctgaataacatttcaaaaacatggtaagattaacatcttccatgggctgagaaaggcttagagaattaggctgaagagtgttttgtcaatcttgcaatgacttacaggcatttgaaaagtgaacttctctaaaagaaatttattttaaatatagccagtctaatttatttcaaagtgatgtaaaccaataagccaaaataaaaacaccagagtcactatatccaagagccaatttatacaaataattttctcctatttaaatttggaaatgaaggaaaaaagaaaaaactcttaccctcccctctcaactgagcactaaaaatagagatgtgaagagctgacgttggtaagaaaccttacccttttctgctggtttctttcagatctctcagagctccatccattggccctagtgtgagcaaagtgtgcctttgtggttgtcaaattgaaggaaagaaaatatgatttattttctcaatcctcatattttcttacctgagacactttcctgaaaaaaaaaagattaacaagagaaaagccagaagaagtttattgatgaatattgtacccatcacctagaagaaggcctcagttcaaatgtatttctctcccagggcagagtagatgaggaatctttcttaagtagtattttaacaaaaaacaataaatcttagcatagagacaaagcaaaggagggggcagttccagtcttttaaaaactgggaaaatgtgggaagatagtaaaccttgttcccagattgttctggtgcttgctgatgccttctctgggccaatttctagtaaggaaggatttatgtcctgacatcaggcaaatagaggtggggcagagtgtttccttgcattttcagtgtgtttaacttaataatcctcaatatttttggaagaagtattttggtttccttcataacgaaatagaaataatggacaaataaacaatctttcttcttcttggggctccatttgctcaacaaatacaggtggactcaagtcagtatacatgcataggcaagtttttcttcaaataatatatcaactggttatatctaaaagggtattccaaagggttttgagcccttgagattgctctgaagtaattttatgtatctctaaggtaccagtgtttattctcgtaaactgttctgtaactgcagcacaagtttggctgtattggatttgatttcctaaaaacaatgatcacctgacaaacacgcttgttgcagtgtgccaccagtactcccctaggccagaaagacacgttgggtcctgtctcatctctctgcaaaggagctctggacaggctatacctaaattaacacaggcagacatatattctctgttttagtgtagcattatgaattatatggtgtttgaaggcaacccggccttttcagtgacccctcctcctgccacactggtagtgtgttggcaaaatgtctgtccttagggagtcctcaaagactccttccttctcttccctctgccctctgcctctgctcccctggctagtctgcgcccacaggtcttggctgtggcacactccccttctgcaggcattgcttcccttattccaccctctgtttgggtctccaaagtgtgatatttgtcttgagaaacactttgccccactatgtcattcccctttccttactctccaagcagctgggtcactggtgctcaggactcaaactggctgggaatgtgagaaaagctccttttccctcctggcctcctacttgagactaaagcaaaatgctgagggttgaggaagggagagcgagtgctcgctgagaaaggaagaaatgagtgtttagacttcagccactccctgataaaggggaacgatcttctgcctcctgggaaaaactttgatgagacagcaaacttgagaaaagtttgtgggaaggagcagtgagaaccgcaggttacgaaggggccaggtgggcaggactgaaggataactccatggtaaccggcgtggatcgatgactatggggccaaagagtgggcatgcctgggtgtgtctgagcagaaactgcattgaggacaagatcccctgcccaccagcacaggctctggctctgtgggagctatgccaaacttagccccagttcaagggaaggagagggaggagagggaggagagggaggagagggatccaaagtgaactgaacttgaatttgcatcaccctagtggaatatgagcttaaaattaacaattatattgttaaagaaaatatgaactacatgtcttaaaaactttggctctggacttagatttctacgcaccatgtccgcagcataacactgcccattctttattgtaattgtctgtttattaatttgtcttctgtactataaattccttgaggaagggaactgtgctttccagtaaacacccagtactggtgcagcacctggcttatagtcagcaccatcgaatcctcaggaaatgacacagttggcgaacctagatgtctaccatgtccaacagtgtccaataggatgctggccaagtgatgagccacctatggcatgaaatgctatagaaccacttacaaattgtgcagtatacaagtatttcatggcatggggaaatggttgttactttgtaaagtaaaaagaaacaggtttcaaaacaatgtgatatctttttaaaatttcatggagctcatacatagaattttttaaaaagaacattcaacagtgtaaattatacccctgagatgtggggtcatggaaattttttattttcttgtgtgcttttttgtacttttcaaagtttctcctgagaccacatattttgttactagaaagggagaaaagcacaaatgtaatctttctaagttgatacgtccctttatattttttggtgggcttccagtttctcaagctgccttgtggggtccccagagctctgggggtgggaccagctctgaggtgaagggaccaggggctcagggtctcagggcccatctcccagtcctgcctccattaatttcttttcctaccatttccccttgatatgctttcccccacctcatctttcccaagatgcttctttgtcctctgagctatgacactgaggatgaacgctctctcagctttctggctgcagctgcctccatgcagggacccccagcctgtgaacttccctctggcacccccactcccccatgcggaaactccctcggccacccgttctcatccccaacccaagcgggacctccctcccccaccagcacccccatgcgggacctctctcccccaccagcacccccatgtggnnnnnnnnnnnnnnnnnnnnnnnnnnnnnnnnnnnnnnnnnnnnnnnnnnnnnnnnnnnnnnnnnnnnnnnnnnnnnnnnnnnnnnnnnnnnnnnnnnnnnnnnnnnnnnnnnnnnnnnnnnnnnnnnnnnnnnnnnccccctcccacccccatgtggggatctccctccatccctagcacccccattgtgggatctcctttcctcacctccaacccccatgtgagaacctccctctcactctcacccccattctgggaccctcctgagtctctgcccttcctcagtcatcacagtctctgtacagctagggactgactctttgcctttggccctgctgtttcccctcacgctaatgtcagcatttggggttgcctggaaacaggaaggataagaacattgattcttcttttttatttgtggaaaatatgcataacataaaatttaccatcttaaccatgtttaggtatacagttcagtggcattaagtaattcacattgctgtgcagccatatccagcatctgtctgcaggactttctcatcttcccaaattgaaaccctgtctccatcccacactatctccccattccctggcccctttgcccccagcccccaccattctactttctatctctatgaaactgactactctggataccttgtatgcgtggaatcctgcagtatttgtccttctgtgtctggcttatttcactgagcttgatgtcctccaggttcgttcatgttgcagcacgtgtcagaatttcctttctttctaaggctaaatcatattccattgcatgggtggaccatattttgttcatttatctgtcctgaacacttgagttgcttccgtgttttagctactgtgaataacgctgttgtggacatgggtggacaaatgggtcttcaagaccctgctttcaattctttcatgtgtatacccagaagtggaactgctggagcgatgaaaattctataattaatattttaaaggtaccactgtactgtttaccacagtggctgcatcattttacattcccaccagcaatgcacaaggattccagtttccccacatcctcaccaacacttgttattttctgaagaacattgatttttttaaaaaggattcattccacaaacatcttctgaagactccccatgttcctgaccctccctgctttccagggatagccagctgtaatcgcacagcttctgtgtgggtgcaggaggccagcaagcactgagacagacgctacgggcagggcatttccgagaaggaaatattttcattctccatttttaaggtgagaaactgaggcccaggagtgtaaagccagtaccctaatatacaactactaaaagaggaagccaggattcaaatccaggcctttgtggtttcatagccttatctcttaattctgatgccagcctgccttcccttccaccattgacgtaccaagagtcagagaggtggcacggtgtacctgtatccacaccactggtgagcagccctccagcatcacacccagactttctaagatgcttggtatcccacagatgggagccaatttctttaggtggggaaagagaatgggagcagagagaacagcctgttccacaaagaaaggagaagaaccaagagtttgggattaagcataaaggtctaattaacatttattaggtgctaagtgcactgccatgtgtcaactcctgtaatccttgaagtaatcctgggagacaggcatttcatttctcaccttacagatgggggcacagagcacagggaggatcttgagagggtcccatggtcagcaagtgttggtgaaaggatatcatcctggctggtcctacccaggtgctccatcttcatcctataaaactctctgtgctttagtttcttctatgaaacaggacacctatttcatagggtagttgtcgggattagtgataaagtgctaagagtaatagctggggcacagttaatcctatgtaaatattggcgaattgtcttagtctgttgcctgttgctataatggaataccatagagtgggtaatttacaaagaaaagtatgtattattatgattctggaggctgggaagtccaagagcatggcactggtacctggtaaggacctccttgctgc

SEQ ID NO: 53 - DNA, 5065 bp, Homo sapiens
cgctcgatcttgggacccaccgctgccctcagctccgagtccagggcgagtgcagagcacagcgggcggaggaccccgggcgcgggcgcggacggcacgcggggcatgaacctggagggcggcggccgaggcggagagttcggcatgagcgcggtgagctgcggcaacgggaagctccgccagtggctgatcgaccagatcgacagcggcaagtaccccgggctggtgtgggagaacgaggagaagagcatcttccgcatcccctggaagcacgcgggcaagcaggactacaaccgcgaggaggacgccgcgctcttcaaggcttgggcactgtttaaaggaaagttccgagaaggcatcgacaagccggaccctcccacctggaagacgcgcctgcggtgcgctttgaacaagagcaatgactttgaggaactggttgagcggagccagctggacatctcagacccgtacaaagtgtacaggattgttcctgagggagccaaaaaaggagccaagcagctcaccctggaggacccgcagatgtccatgagccacccctacaccatgacaacgccttacccttcgctcccagcccagcaggttcacaactacatgatgccacccctcgaccgaagctggagggactacgtcccggatcagccacacccggaaatcccgtaccaatgtcccatgacgtttggaccccgcggccaccactggcaaggcccagcttgtgaaaatggttgccaggtgacaggaaccttttatgcttgtgccccacctgagtcccaggctcccggagtccccacagagccaagcataaggtctgccgaagccttggcgttctcagactgccggctgcacatctgcctgtactaccgggaaatcctcgtgaaggagctgaccacgtccagccccgagggctgccggatctcccatggacatacgtatgacgccagcaacctggaccaggtcctgttcccctacccagaggacaatggccacaggaaaaacattgagaacctgctgagccacctggagaggggcgtggtcctctggatggcccccgacgggctctatgcgaaaagactgtgccagagcacgatctactgggacgggcccctggcgctgtgcaacgaccggcccaacaaactggagagagaccagacctgcaagctctttgacacacagcagttcttgtcagagctgcaagcgtttgctcaccacggccgctccctgccaagattccaggtgactctatgctttggagaggagtttccagaccctcagaggcaaagaaagctcatcacagctcacgtagaacctctgctagccagacaactatattattttgctcaacaaaacagtggacatttcctgaggggctacgatttaccagaacacatcagcaatccagaagattaccacagatctatccgccattcctctattcaagaatgaaaaatgtcaagatgagtggttttctttttccttttttttttttttttttttgatacggagatacggggtcttgctctgtctcccaggctggagtgcagtgacacaatctcagctcactgtgacctccgcctcctgggttcaagagactctcctgcctcagcctccctggtagctgggattacaggtgtgagccactgcacccacccaagacaagtgattttcattgtaaatatttgactttagtgaaagcgtccaattgactgccctcttactgttttgaggaactcagaagtggagatttcagttcagcggttgaggagaattgcggcgagacaagcatggaaaatcagtgacatctgattggcagatgagcttatttcaaaaggaagggtggctttgcattttcttgtgttctgtagactgccatcattgatgatcactgtgaaaattgaccaagtgatgtgtttacatttactgaaatgcgctctttaatttgttgtagattaggtcttgctggaagacagagaaaacttgcctttcagtattgacactgactagagtgatgactgcttgtaggtatgtctgtgccatttctcagggaagtaagatgtaaattgaagaagcctcacacgtaaaagaaatgtattaatgtatgtaggagctgcagttcttgtggaagacacttgctgagtgaaggaaatgaatctttgactgaagccgtgcctgtagccttggggaggcccatcccccacctgccagcggtttcctggtgtgggtccctctgccccaccctccttcccattggctttctctccttggcctttcctggaagccagttagtaaacttcctattttcttgagtcaaaaaacatgagcgctactcttggatgggacatttttgtctgtcctacaatctagtaatgtctaagtaatggttaagttttcttgtttctgcatctttttgaccctcattctttagagatgctaaaattcttcgcataaagaagaagaaattaaggaacataaatcttaatacttgaactgttgcccttctgtccaagtacttaactatctgttcccttcctctgtgccacgctcctctgtttgtttggctgtccagcgatcagccatggcgacactaaaggaggaggagccggggactcccaggctggagagcactgccaggacccaccactggaagcaggatggagctgactacggaactgcacactcagtgggctgtttctgcttatttcatctgttctatgcttcctcgtgccaattatagtttgacagggccttaaaattacttggctttttccaaatgcttctatttatagaaatcccaaagacctccacttgcttaagtatacctatcacttacatttttgtggttttgagaaagtacagcagtagactggggcgtcacctccaggccgtttctcatactacaggatatttactattactcccaggattcagcagaagattgcgttagctctcaaatgtgtgttcctgcttttctaatggatattttaaattcattcaacaagcacctagtaagtgcctgctgtatccctacattacacagttcagcctttatcaagcttagtgagcagtgagcactgaaacattattttttaatgtttaaaaagtttctaatattaaagtcagaatattaatacaattaatattaatattaactacagaaaagacaaacagtagagaacagcaaaaaaataaaaaggatctccttttttcccagcccaaattctcctctctaaaagtgtccacaagaaggggtgtttattcttccaacacatttcacttttctgtaaatatacataaacttaaaaagaaaacctcatggagtcatcttgcacacacttttcatgcagtgctctttgtagctaaacagtgaagatttacctcgttctgctcagaggccttgctgtggagctccactgccatgtacccagtagggtttgacatttcattagccatgcaacatggatatgtattgggcagcagactgtgtttcgtgaactgcagtgatgtatacatcttatagatgcaaagtattttggggtatattatcctaagggaagataaagatgatattaagaactgctgtttcacggggcccttacctgtgaccctctttgctgaagaatatttaaccccacacagcacttcaaagaagctgtcttggaagtctgtctcaggagcaccctgtcttcttaattctccaagcggatgctccatttcaattgctttgtgacttcttcttctttgtttttttaaatattatgctgctttaacagtggagctgaattttctggaaaatgcttcttggctggggccactacctcctttcctatctttacatctatgtgtatgttgactttttaaaattctgagtgatccagggtatgacctagggaatgaactagctatggaaataactcagggttaggaatcctagcacttgtctcaggactctgaaaaggaacggcttcctcattccttgtcttgataaagtggaattggcaaactagaatttagtttgtactcagtggacagtgctgttgaagatttgaggacttgttaaagagcactgggtcatatggaaaaaatgtatgtgtctccccaggtgcattttcttggtttatgtcttgttcttgagattttgtatatttaggaaaacctcaagcagtaattaatatctcctggaacactatagagaaccaagtgaccgactcatttacaactgaaacctaggaagcccctgagtcctgagcgaaaacaggagagttagtcgccctacagaaaacccagctagactattgggtatgaactaaaaagagactgtgccatggtgagaaaaatgtaaaatcctacagtggaatgagcagcccttacagtgttgttaccaccaagggcaggtaggtattagtgtttgaaaaagctggtctttgagcgagggcataaatacagctagccccaggggtggaacaactgtgggagtcttgggtactcgcacctcttggctttgttgatgctccgccaggaaggccacttgtgtgtgcgtgtcagttacttttttagtaacaattcagatccagtgtaaacttccgttcattgctctccagtcacatgcccccacttccccacaggtgaaagtttttctgaagtgttgggattggttaaggtctttatttgtattacgtatctccccaagtcctctgtggccagctgcatctgtctgaatggtgcgtgaaggctctcagaccttacacaccattttgtaagttatgttttacatgccccgtttttgagactgatctcgatgcaggtggatctccttgagatcctgatagcctgttacaggaatgaagtaaaggtcagttttttttgtattgattttcacagctttgaggaacatgcataagaaatgtagctgaagtagaggggacgtgagagaagggccaggccggcaggccaaccctcctccaatggaaattcccgtgttgcttcaaactgagacagatgggacttaacaggcaatggggtccacttccccctcttcagcatcccccgtacc

SEQ ID NO: 54 - DNA, 1356 bp, Homo sapiens
atgaacctggagggcggcggccgaggcggagagttcggcatgagcgcggtgagctgcggcaacgggaagctccgccagtggctgatcgaccagatcgacagcggcaagtaccccgggctggtgtgggagaacgaggagaagagcatcttccgcatcccctggaagcacgcgggcaagcaggactacaaccgcgaggaggacgccgcgctcttcaaggcttgggcactgtttaaaggaaagttccgagaaggcatcgacaagccggaccctcccacctggaagacgcgcctgcggtgcgctttgaacaagagcaatgactttgaggaactggttgagcggagccagctggacatctcagacccgtacaaagtgtacaggattgttcctgagggagccaaaaaaggagccaagcagctcaccctggaggacccgcagatgtccatgagccacccctacaccatgacaacgccttacccttcgctcccagcccagcaggttcacaactacatgatgccacccctcgaccgaagctggagggactacgtcccggatcagccacacccggaaatcccgtaccaatgtcccatgacgtttggaccccgcggccaccactggcaaggcccagcttgtgaaaatggttgccaggtgacaggaaccttttatgcttgtgccccacctgagtcccaggctcccggagtccccacagagccaagcataaggtctgccgaagccttggcgttctcagactgccggctgcacatctgcctgtactaccgggaaatcctcgtgaaggagctgaccacgtccagccccgagggctgccggatctcccatggacatacgtatgacgccagcaacctggaccaggtcctgttcccctacccagaggacaatggccacaggaaaaacattgagaacctgctgagccacctggagaggggcgtggtcctctggatggcccccgacgggctctatgcgaaaagactgtgccagagcacgatctactgggacgggcccctggcgctgtgcaacgaccggcccaacaaactggagagagaccagacctgcaagctctttgacacacagcagttcttgtcagagctgcaagcgtttgctcaccacggccgctccctgccaagattccaggtgactctatgctttggagaggagtttccagaccctcagaggcaaagaaagctcatcacagctcacgtagaacctctgctagccagacaactatattattttgctcaacaaaacagtggacatttcctgaggggctacgatttaccagaacacatcagcaatccagaagattaccacagatctatccgccattcctctattcaagaatga

SEQ ID NO: 55 - DNA, 37051 bp, Mus musculus
  misc_feature (36527)..(37051): "n" at positions 36527 through 37051 can be any base.
gtctggaggttttatttgtccctgagggggtgccattttggtttgggggtatgatatgaagaacctgtgtctgagagcggagttgtagagagtgggcagcagccagcatcctggcatagtccccttgctacagggcaggaactgaagagagagaaagcacacacagtctccagtctgctctgcttcccgcgtccactgtgctattgatgtttgaaagtggaaggaaccgtgaactcttttattacccagatgatgcatattcatgacagaagctgggagagaaaagcagaccagcctcctaaatgagagtttcacagagtctatgtcgacatccccccacagggctggggggagggggctctgctgcgcctgtaggctcacttcgagtgtagacccagatttgaaatctgcctggtttgaaattcaggctggtcttgtctctagcctggccccaattaacagtcattattatttcttttttattgaggtgaggttcacttagtatgtgaaagtaacccctttaaagtgagcgcctccatggcatgctccagagcttacgtcatcccagaaacctctgcccagcaagcagccactgcacctccattctagagcctgattccagttgcacccactgcccaaggtcgggtagcctgtggccatgagagatgagggcggggagctgactgccctacatgtctgtcaacagctgcagcggagcctttgtgggccaacgatgccaggactccaatccttgcctcagcacaccgtgtaagaatgctggaacgtgccacgttgtggaccatggtggcactgtggattatgcctgcagctgtcccctgggtttctctgggcccctctgcctgacacctctggacaacgcctgcctggccaacccctgccgcaatgggggcacctgtgacctgctcactctcacagagtacaagtgccgctgcccaccagggtggtcaggtaagggctataggaggttgtgaacttcacggttgggacccttaggcctgggcccaaggaccctatctttgttgacttgacatactctggtacactaaactttatcctctcctggatcagagttaagctgggatctactatccagaaaaatcttggggattccttgggaactctggtccttttcaaccccaaactatctgatttttggctgccctgttccaggaccccaacctctcactgtttctgtgcgtaaagaatgagtcctcatgtagcccgggtcttaccatctccttgtcagggtgcctcaggtttccattgcttctctatgtggggtccaggagacagctaggtacaaattttagactgccattcctactttctgtccttgagcagtcacttagtctcttatgacttacagtcctctgtatgcagaaagatggccacattctgcaacagatactgagcatcatgaagataacactttagatctatccctggttggtacctacatgatgtccaaatctgccctgggttcacagggaggccctggcaacagctgaccctcttctctgcctcccaggaaaatcatgtcagcaggctgacccctgtgcctccaacccctgtgccaatggtggccagtgcctgccctttgagtcttcatacatctgtcgctgcccgcctggcttccatggccccacctgcaggcaagatgttaatgagtgcagccagaaccctgggctgtgccgccatggaggcacctgccacaatgagatcggctcctatcgctgtgcctgccgtgccacccatactggtccccactgtgaactgccctatgtgccctgcagcccctcaccctgccagaatggaggcacctgccgtcctacaggggacaccacccacgagtgtgcctgcttgccaggtaggttccatctcagtatgctggcatctagcctggttgtccatgtccatgcgtgttccactgtcaagcccgagggatgcagaaagagttaataccctttgaagggagcccaaaaagaagtttagagaagggcagcagccatggagccttaggtgtggtataagagcaggtcaggatagggataccagaagtgaggggacactctcagtgacaccacacacgtctatttctgtctgggccatctactgagatccagttagtttggtgcataacctccaagccttctttctgctgataagagtgccttcccttggtattttcttcatgctgggcctcccctgacccatagccaactaatacccaccatgtcaataccctgagcctcttagggcagggagccagcctgcctttacagatgctcatgaactgtttggaatccacatgtgactctctgtatgttacgggagcaccctgtcatgggcagtccctggggtttcccctttctctggggatggtaattgaataacagggtcttgagggccttaggggcctcacgtttttcattacttcctctgcagtgttcttcccactgtgctcaatgtctctgcaggggtggggcctgcaggcacagccctagtcctttctgttgctgctctaacgatggtaactcggtgatctaaggcagcttggagctgccgccaacccacttttggcaagggtggggttggtcaacataccaggccgttgagaggaaggaggagtgggctcaggaaataggaatagatttggttgctgggggtgacctcggaccactccccttgcaaccccggggccaccctacacactgaaaaagggaagttcccttctgccccaagcttgcagagccagcctcaagactgcgtgcagacactggcttatacatttcctgaaagtcattgggcaagctcggaggtagccgacagctgcctacacgcttcccagcctccctgggggggctgggacaggatcctcacgctcaggagggccccagagctgagttcagctctgtcttggtggccacctaagacctcagctgttagaacctgtgttgagaggctagactgggtctgtcatgcagactgagagaaagccttgttcaaggagcttgtgaatggagctgccaccaatccaccttaggcagggtggggtgggtcaactcagagtgctggaagatgggcaggagggaagcaaggactgggtggggtccctttaccttagccggtgggtcatccctgaagacggaacacacactaccctgtgctgtgtggagacatgctgtttcagagtagggagaagtgaaaattgtccacccaaattgctgttgaagggagtccggtctgggcacagttatacccaccatttgggctcccaggtagctatttaccaggtttctgaagaatgtatgaactagggtggacataaagaactaagatgggaacagaacttaagcctgagagctgactgggaattaaagcgactctggctcctgtatatctatcctctcactctctcacaagcccggtttccctggaggaggctgtataggcagagaaggctttggccaggctccacataggacctatgatcccttctcctcgcccccagtgaaatccttctacacctgctcagggcccctccaggctcgcttcttcttggaagcgtgccctgtgctagaataaatctctgcacaggcagggagacaagctatttggtcttgctgacccctgggcgggcactaggctccaagttggttcctccctcacccagataagccttttccaagcctccagcttcttgctgtggtgcaagatggtggggtggaggggcatctttgaggaggaggcagacaggtgggttctccaagggcaggaggggttcaaaggcatccccagagatggtgttaattagtaaccggctgcaagtttggctgttgccagactcgcctttctgggttgatcattgacccggcaggagttgaggagattaatagctaactagctgctgagcaggccctcaggaagccacactgcaggccacaccttggggcccagccccaggctagatgggcttgtagaagagagatggttgccctggctgtgccctgaggaaatcacaggttctgactgagcgggcctgcctggatcccaccactctggtttctaacttagtgctcccaagccccacttttagctccagcagttttaggtattcgtggctgccccactgattcagtgtggacaaccatagagtgcaatcctctgaaactctgttagtggttttgtggcagaacctccaaggacactatgttcctagatccctgtctgttgagtcagctctttacatagcgactttctagagaagagctgtcacctgtggacacgggagtagggatgccacggaaggacagacagatgccttgtccagagcagaacattgcaggtccacccagaatctgaagataccggagcccacccgaggctcctcagcagacttctgaggtcaggctaacctgctggctggcccctgtcccacaggttttgctggacagaactgtgaagaaaatgtggatgactgtccaggaaacaactgcaagaatgggggtgcctgtgtggacggcgtgaatacctacaattgccgctgcccaccggagtggacgggtatgtatatgggacttgtaggcagcagccttccactaacaaaactgcacaccgcggagtggtaggaaggtctgaactctgttccacgctatgaaagcccacactgcaagacccagggtggctggtagcatgggagcagcagcttctgtgcttccagttggagtcagcacagctcagcatcagatggttcttgtgagctattagcagctaacatccagagtcaggcccccagcactgagccatacaggagctagcattctgggcaagctaccagggatgaatacaaggttgtcctcagccccacagcccagagcacggagctcatcttgtagctgaggttgatgttcctgtgacccctcataggtcagtactgtacagaggatgtggacgaatgtcagctcatgcccaatgcctgccagaatggcggaacctgccacaacacacacggcggctacaactgtgtgtgtgtcaatgggtggactggcgaggactgcagtgagaacattgatgactgtgccagtgccgcctgtttccagggtgccacttgccacgaccgtgtggcttccttctactgtgaatgtccgcatgggcgcacaggtaagtcggtgcaggaatgtcctgggagaagggaaacttggttggctcaccacccctggtggaaacacctggggagccatgtatgagatatatatacagatatatgtgtgtatatacatatatatatatatatatatatatatatatatatatatatatcagatatagatacagctcagatgtagatacagggctggaaatgcagcacagttggtagagtggctgcctagcatgcacaggatactggactcaatccctaggaccacataaactgtgggtagtggcacgtgcctgtcaagccaactcccagggaagagtgaatccaaaggttaaggccatctttagctatatagcaaacttgagttcagcctggaatatgtgagaccctgttttaggaaagggatggggagagagaaagctctgtctctttggcacctccagcaatgacccagtaagccttgctggacagaggcatcctggtgatctgaactttgtgggatgcttgagtgagtcagagagattcattccagggtgttgggtgaggatggccctgctgcaacaacctgttaatcccaggatagggaaaagcagcacccactcaccgcagctgccttgtctaggtctgctgtgccacctcaacgatgcgtgcatcagcaacccctgcaacgagggctccaactgtgacaccaaccctgtcaacggcaaagccatctgcacctgcccctcggggtacacagggccagcctgcagccaggacgtggatgagtgtgctctgggtaggtacagatgcagtggcacaggcagcaggaacgggctggctgtcacatatatgggatgtgatctgtcctggagaaccaccattttgatggcctgggctggggcattgcgggtggtcgggaggctgcaaggccagatgagccctcatccgtgcctctttcaccaggtgccaacccttgtgagcacgcaggcaaatgcctcaacacactgggttcttttgagtgccagtgtctacagggctacacgggaccccgctgtgagattgatgttaatgagtgcatctccaacccatgtcagaatgatgccacttgcctggaccagattggggagttccaatgcatatgtatgccaggtatgtcttatgccatttcccaccatgggggctgctaagagcaggcagcaggggaatgagtcaaggctgcatagcttcaagtaacatttctgtcatggttggtagcatctgggaagccgaggccaggataacaggacaaagtggagaatgtacccagagttgggtgcatagactcagtagatatagacatgaaccacagtgggcacactaggcccgtatgagggagggttatttctctcccaagtcttcagctggggctctagaaggacctaccgaagccgtcctcggtctcaccatctcccgtccacaggttatgaaggtgtatactgtgaaatcaacacggatgagtgcgccagcagcccctgtctgcacaatggccactgcatggacaagatcaatgagttccaatgtcagtgccccaaaggtgaggccacctacttaccacaggacccgtatcctcatgatctcttcccagactcctttgagggaggacttgagttgactagggcgttttcaggctttcctcaaaaggtaaaggcccacgtgagcagtggacgctgtaggggacctggcaccggaaaccctttactaaaggagggaaggatgggcaggagctgcagcgctcctaagataggagagtccacctgcttggctctgtcctcttcctgatggtcatgggagtaaggacatagtgtggggatctgacctctatgcctgggaaggacttggaggaactgaagaggggaccaaagtcctgggaatctgtctcttgcctactccagggctggaccaggccttgggccttctgagatgtaaataagccatcctagacttggtccagctaggggagtcccattcacagcctagtgcagctgtaaccatagcaaccagagtctatttaggaaaaaggcccctctgttgggccaaggaggcagccactgagcagtgctaaacaaggagctgattagaggggcagggtgcaaggggcaggatataagggctggttgaagcctggaggttagtggcccctgttatcaaagtaccctctagggagcccatgtgagcagacattcaactctaaggtttgtgggtagcaaccaaggggttaggatactgtcagatataaccatctcgtcttccctggccacaggcttcaacgggcacctgtgccagtatgatgtggatgagtgtgccagcacaccatgcaagaacggtgccaagtgcctggatgggcccaacacctatacctgcgtgtgtacagaaggtacaagaggcagtgcaagatctgggggagggaactcttgaggctagatagtgctgagaaggggacaggaaactggggaggccttagtttggggccatataatctgagagtcagaaacttaactccgcttggactccaggcaggagtgatgagaacatccctgggtatgtgataccccacatccatcgatgaccaggcagtgatcctgggcctgctcggtggtttgccaaggtgtggccaactaagtgttgagggagtaactggccctgaagctcactaatgtccacctttcctgccatctaggttacacagggacccactgcgaagtggacattgacgagtgtgaccctgacccctgccactatggttcctgtaaggatggtgtggccacctttacctgcctgtgccagccaggctacacaggccatcactgtgagaccaacatcaatgagtgccacagccaaccgtgccgccatgggggcacctgccaggaccgtgacaactcctacctctgcttatgcctcaagggaaccacaggtgactggccggagctggcagtgggtggaaaagggtgaggccaggcttggaagctgaccacatgtcatgctgcccctagggcccaactgtgagatcaacctggatgactgcgccagcaacccctgtgactctggcacctgtctggacaagattgatggctacgaatgtgcctgtgaaccaggctacacaggtgagtggctgaaggcagaggtcagggtcatccctagagtctgggagggactgtggggctagccagggtccaagggctggatgtcacaagctgggtgtcaactacccagatcttgatctgccaaccagtagaggtatctatcataaagactgggtggcctccatatgcctcctttcccctgtcagtgtcagccctggccatgccagacttaaagccccagtagcctgaagtggggtggccagagctccgaggccaggcttttggatatgtgtttagatctgataaaatccttagtttctctgagcaccgaggacattgtccaccagaggatagaagaggatgggtggtctcaggctgaggtaaagctgggctgcagagtgactcagttggtaaggtgttgacctagcatgtgtaaaccctgggttcagtcctcctgccatgttaaccagatgcagtggcatgcatacgttgtaaccctagcactctgacattggaagcgagaggatcagaagtttaggtcattctcagctacatgtgagtttgtggccagactggatcacatgaggctcagaagctactggcactacggtcatgtaactcatcgatacataaggcactttactatcgctcaaagtttcatagattagcacaaggggaaacttagacccagctaggtctagctctaggaggggtaggctctgggtggcaggcctggaatctgagccccttcccacccacaggaagcatgtgtaacgtcaacattgacgaatgtgcgggcagcccctgccacaacgggggcacttgtgaggatggcatcgcgggcttcacttgccgctgccccgagggctaccatgaccccacgtgcctgtccgaggtcaacgagtgcaacagtaacccctgcatccacggagcttgccgggatggcctcaatgggtatggcagactgacctgggagggactagctgtagccttgggcagacacaggctgggtgaatgggtgctcctgtgagaccagtgatctgaggtcagcccctagtgtcttcccagcatccctgggctgtatcctcattggctagcatcagctcaggatatagactctaagcacactgtggctgctgaaacagttgtctgatactgtggtgacagcagccctttgtcagtgtgtgggggacgaggagattactaaggtctccgttaaaactattaaagttttatacagagggtcagcattgtcaaggtggcattgttccagtctggaacccttgcacggtcttgggccaggtgggtacctccagcccagtggatgatgtggccttgtcctcagactggaactgtagtttagcaggagagctctgagcccaggctacagctcaggcctctccgtaggtacaagtgtgactgtgcccctgggtggagtggaacaaactgtgacatcaacaacaacgagtgtgagtccaacccttgtgtcaacggtggcacctgcaaggacatgaccagtggttacgtatgcacctgccgagaaggcttcagtggtaagtgtggcgggtgacacagcagaatgggtcctccctttggtctctttctcggtccacctgatgagctagcatttctcaggcagagatcctagttctcttgaggaaaggcatagggcagaggctctggcccacctcctcttgctcaacttccttacaggccctaattgccagaccaacatcaacgaatgtgcctccaacccctgcctgaaccaggggacctgcattgatgatgtcgctggatacaagtgcaactgtcctctgccatatacaggtacgaacagccagggactggaattggctctggtggtagctagtggagctaagagtatatgggcttaccaggcactgaagaaggttctgttcctcgctgagggtcttaggtcctcagactggaactgtagttaagcaggaaggctctgagcccaggctacagcccaggcctcctgggcctggggatagtcaccagatgggcaaacacagaggatgcctaggaggaagctccaggccgtgtgtccgggtgtttatctggtatgtctggagtgaggtgagcactggactcctccagagaaagtctgggaggctgactggtaggtactgcatggatcagggtccactttgcctgtgcctctgggggccctggctgccctcctctgctggctgggcctgggattcctttgatggcagcttctttgtgtgaggagacaaggagccctctgttagatgaacagaggcagctcctgccatgggcactgcctgaggaatggcgagaaatagaccccctgcaggagagatgtgcattgaacatgaaagccgtgaccacatggcccccaaccctgcagctcccaatactgccacagagtactggtggcttcatgctgctgctgctaggttctggacatagcaagtgggtctgtgaaggtggaggcccttccagtgttcctatgatgcctggcaggatgctgttttctttgacaaagttaaagggcctggattttgtctcctgtgttggtcagtgaggaaactgtcagcagccaggcacaccccatgttccttttggtcttgctgctatcggggctagcgggaggagtcaagccgcgctgaccagcttcctgcttccctttgcacaattgtcggaaactctgtcaaagttcctgtctgcccaggtcaccgtggaaaccgatagagagagaggccctggagagtctcaccagtgggctggggacatggtgggagacaaggaagataaggtttccttgcttagctcctggagccaaccatggccataaacaggaaagctaactgggattgcaaggagagtcacctgggttactcgtggctcccccaagcggttatcagatttcactgccctagtgtgaggctgcaccccatgttccccaagtaggatatgcttggggtagccacagtagctctgtctcaggagtgagcctgctgtgacctaaagcttcagaatcagctcaaggattttcctggaatggggagcaggccaggttcctccaggctcaaccacctgttatagtagggtcttgttttgaggttttctggttgggcaaggcccaggcttcatcgtggagcatttgggagatgagagatggcttccgggactacatagatggctcatggagaaagagtgcttgtggaaacatgaagcctgtttcatgaaaacagggtacctctaaatgcccataaccccaacatttgggagcagagacatcttgagagctctctggctggccagcctagctaagatggcaaagcatctgattcagtgagactctgtctcaaaggaataagatgcggggttggtagaggacacctgatatccgtctctccttctgcatacactcttacacacctgcatgcaatatactatgctcgttaaaaaaaaaaaaaagtgacttaagagagaaacttgattctgctttatctctaacctcctgtcagtaatcgtcattcctcccgggatcagagtctggctggccaatcatacagcatctcctatacctaccccccgcccccctttatggaagaccctatgggccaggctcactgggttctatcttctacaaatctttctttctaggagccacgtgtgaggtggtgttggccccatgtgctaccagcccctgcaaaaacagcggggtatgcaaggagtctgaagactatgagagtttttcctgtgtctgtcccacaggctggcaaggtgaggcttgcctggtcccaccaggctgggacaaggatggtggatgggaagtcaggggccctggccagcctgtggggcagtctcgagaaaggagcccatcaatgctgagctacctgctctgggaagctctgggaagctctgggaagctctgggagcaggagatggtccttcccattccaactccatatccttctgttgcccagaggtcaggggagaagctctggagataaacagaccagctaggacagaggctcagagggtgggggcaggtaaccaaatgagttttttgtcttcacaggtcaaacctgcgaggttgacatcaatgagtgtgtgaaaagcccatgtcgccatggggcctcctgccagaacaccaatggcagctaccgctgcctctgccaggccggctatacaggtcgcaactgtgagagtgacatcgaatgactgccgccccagtaagtggtacccagctctgtccatcctatgtttgggtgcctctgttcctaagcacacatgacagggagctgctgagagtctgaggtggaaaatagccctggtgcccggcagtcatgaaggactgtggatagctgtgccctcagcttagtccacttgcctgtgccttaaaaagagacaggccagaggctagacaggccaggaggaggctgttgagcatcagtgtgtgcttctcacgggctttgctgctagatttcccagcccagttgagtgatatggagcagaggcaccaggcacttcaaaatgatggcatggggcctagttgtattcaaccttgacactcggcccttgtcaggacccattgagttgtgtagggctttagagatgccctgcatcctgagtcaaagctaaaggcagagagagattgagggaggttctgcctggcaccatcagtgtgtgtgtaggggaatgggcttccctatgactgccttgggcctgagggaaaaagtgtatgcggagcagattccaggctcagtgctgggatgggcccctgttgactactgtcatcaaggcttgctgtgagcacttgccaccccataccaccttctcagcatcaggtccccgaagcatggccagtggccacctaaggctcatctttctgtccctccagacccgtgtcacaatgggggttcctgcaccgatggcatcaacacagccttctgcgactgcctgcccggcttccagggtgccttctgtgaggaggacatcaatgaatgtgccagcaatccctgccaaaatggtgccaattgcactgactgtgtggacagctacacatgtacctgccccgtgggcttcaatggcatccactgcgagaacaacacacctgactgtactgagaggtgggtcccagcctcagctgagacagggaaagaaatggactgtggaagacacaaagtcttgacagcatggcatctcaagctggtgtcttgcccagacccagtgggcatacagcactaattgaactgaatccagcgttgttcattatgttgcagtatccctcctaaaggggcctttgtgacctccagtgacttagaacaaggaagtttgtgcagaggaattggggaactagcctcctatcaaacaagagctttgtaatctgtcttagttccccttttgccctggttgccaggaagcttagagttaaatcaatctcaagcctggtttgtgatgcgcttcctatagtgttcctattttgcccttgattttgtttttctcaaccaccacgtgtctatatgctataaaatctctgctcgtgatttgggtattgtggccaggtaggcatggagttgtctctcctggcaaggaccttagggaactcctcactcttccctgcttctcatctgcctctagctcctgcttcaatggtggtacctgtgtggatggtatcaactccttcacctgtctgtgtccacctggcttcacgggcagctactgtcagtatgatgtcaatgagtgtgattcacggccctgtctgcacggtggtacctgccaagacagctatggtacttataagtgtacctgcccacagggctacactggtctcaactgccaggtgagctgaggttacagggtatgacccagaaggcctagggctctccagtgcccattgcccagccctgggccacactaccttcagagggccagggacacagaagcagagaggctccctggtgtcatcattggttgatgagccagaatgaacccacatcctctgggaaaatgccaagttgggtgcttctgagggagacaggtgggcatgggtgccagccaggctcttctgtggagtgcattatgtggccatctgtctgaagcagcctggggcagtgctcacttctggtggaggatgtccaaggggaggtagccagtgggttgtggagagccttgaaagagagcaaggaagacgtggagcccaggcctatgttgttcggagggcgggcagtgtttgtgagtcctgtgcctgggatttcttaggtgatattctttctgagatggtgggggtgggggtggggaagtcagagcataaaatgccttattccagtggcgctcagcctgtgggtcatgaccccaataggggtcatatatcagatatcctgcatatttttgctacatgacagtagcaaaattacagttatgaagaagcaatgaaataattttatggttggaggtcaccacaacacgaggaactatattaaaagactgcagcattaggaaggctgagaactgctgtgcttctcagagccagccaggaccagggcaggagggtgccctagcagtcagagttggtcagggagaagctaaccagcgcctgtctcctcagaaccttgtgcgctggtgcgactcggctccctgcaagaatggtggcaggtgctggcagaccaacacgcagtaccactgtgagtgccgcagcggctggactggcgtcaactgcgacgtgctcagtgtgtcctgtgaggtggctgcacagaagcgaggtaaccaaccggccgggcccacctgtccttgctcaggctcagcttaggccaggagtgccccggtgcctgccaggtcaggtgacaatgggcagtagtcccgagaatcggagcccaggcctcagctccttcccgtcttgtccccacaggcattgacgtcactctcctgtgccagcatggagggctctgtgtggatgagggagataaacattactgccactgccaggcaggctacacgggcagctactgtgaggacgaggtggacgagtgctcacctaacccctgccagaatggagctacctgcactgactatctcggcggcttttcctgcaaggtgtgggccgtcatggggtggcggggagggtatcagcgtgagtgttgctgcaggggagggcttttgactgggagctagtgcatcatggcagactgagcacatacctgtgcaggatccggtcacattacagatgtgctgaaggaggagaactatgccaagcagtggcttagggcacccctttcctatatggtttcatggtacctaatacctgctccaagacctcatccctgggggaccaggtgttgccccacacacacacaccttggacacttattttaacttactggggtctactgggtggagccctcgctgcagggtgggacagtgtagtctaactgggtatatggcctgcatggcaagtggaggacatgataccacaaccccagctaagctgtgacctgtgccatttctacagtgtgtggctggctaccatgggtctaactgctccgaggagatcaacgagtgcctgtcccagccctgccagaatgggggtacctgcattgatctgaccaactcctacaagtgttcctgcccccgggggacacagggtaagggtagggacctggatgatgggcaggatccagccagagatcactcaggtgattgagagctgaccacggaataggaatctcagaagggaggtgggctccagtggcactgtgctgcctcccccgggccccaggtcctaactgatttctggactgggctgcacaggacagagcacagtcagcatcatccgacggtgtctctggtcactctgcaggtgtacactgtgagatcaatgttgatgactgccatcccccccttgaccctgcctcccgaagccccaagtgcttcaacaatggcacctgtgtggaccaggtgggtggctatacctgcacctgcccaccaggcttcgtcggggagcggtgtgagggtgatgtcaatgaatgtctctccaacccctgtgacccacgtggcacccagaactgtgtgcagcgtgttaatgacttccactgcgagtgccgggctggccacactggtgcgtgccttgggcaggtgggtcgaacgggtgggtgggcagggtcaacagggatggctccttactgtcccttcttcacacaggacgccgctgtgagtcagtcatcaatggctgcaggggcaaaccttgcaagaatgggggtgtctgtgccgtggcctccaacaccgcccgtggattcatctgtaggtgccctgcggtaggtgtccctggccctgtgcggctgcaagggtgccaggtctgagggtgcctgaaccctgaccgactcttatggtggatctgtcctccacccaccctcactgtgaatagtcagcctgaagacctctagcagaggctagggtccaagccacatgcttcctcgtgtccattccccagctcgtttataaaacccgagcgggcacgatccatacatgccttgctcccagtgctctgcagcctcaggctgaaagattgccttgtatttgaggtaccttaggcttcacaacaagaccctgtttaaaaagtttatttcctgctgtgctatgttgggaacctcacacatgctgggcaagtgttttgccactgtgtcttagcccaattttttaaatagatgtttattttagagcggttttaggtttgcatgagaacttagcaagagggccaggtccccaccctgcaggccgttccctatgtttgctgccttgcgtggaaggtgttgagctggcactaatatgcagtatttgctcttgggtgttgacatccagggatctgtacacatacaatgtaccagcatcagccttgggtttcatggctctaaaaactcctagggttctccccattcacctatccctccagtttgaagcccttggcaaccctgaccatcctatggtgagatgtttcaagggtcttgttattggggcaaggccatagacacctttcacaggccacagactggggccaggtctttgctggggtgtgcatggtgtccctgattgaatgcaccatcctctctccaccacagggcttcgagggtgccacatgtgagaatgatgcccgcacttgtggcagcttacgctgcctcaacggtggtacatgcatctcgggcccacgtagtcccacctgcctatgcctgggatccttcaccggccctgagtgccagttcccagccagcagcccctgtgtgggtagcaacccctgctacaatcagggcacctgtgagcccacatccgagaaccctttctaccgctgtctatgccctgccaaattcaacgggctactgtgccacatcctggactacagcttcacaggtggcgctgggcgcgacattcccccaccgcagattgaggaggcctgtgagctgcctgagtgccaggtggatgcaggcaataaggtctgcaacctgcagtgtaataatcacgcatgtggctgggatggtggcgactgctccctcaacttcaatgacccctggaagaactgcacgcagtctctacagtgctggaagtattttagcgacggccactgtgacagccagtgcaactcggccggctgcctctttgatggcttcgactgccagctcaccgagggacagtgcaagtaagtaaggctgagtttctttagagtcccagggctcaggatgctacgggaggacctaaccaaacaccaggctcctgaagccaatgtctatccctgcccattgcgagtcgccaagcacatttcccagatctggcctattcaaggtatgggtttgaggtccacaggctgggatgggactgagtgcatcctatacctcctcagccccctgtatgaccagtactgcaaggaccacttcagtgatggccactgcgaccagggctgtaacagtgccgaatgtgagtgggatggcctagactgtgctgagcatgtacccgagcggctggcagccggcaccctggtgctggtggtgctgcttccacccgaccagctacggaacaactccttccactttctgcgggagctcagccacgtgctgcacaccaacgtggtcttcaagcgtgatgcgcaaggccagcagatgatcttcccgtactatggccacgaggaagagctgcgcaagcacccaatcaagcgctctacagtgggttgggccacctcttcactgcttcctggtaccagtggtgggcgccagcgcagggagctggaccccatggacatccgtgggtgagtgctccagctcctgctgttgtgggctgtttcccagtgtgtccctgggttctctaaccagcttaaccctggaggtgtaacctcaggggaggtagtattcaccttattttatagtcagaaagcacctgggatgaagagggcatccctctgatgaggacttggcaggcctcagggtttgcccagatgtgattttcaggccccactgtgtaccaggtgttggagaccaagctgattaaagcctccagggtgtcccctggggctaagtcatcctagaccaatcctgaccctcagtcactacagcccttatccctactacagaggaggcagtgaggggtacagaagggcactgttgctgagcctggaaggctgaggagccgagggaggcacaaataagagcatctcctggatgctgcacagagccatctggggatgggcagggaagcaccagccaggcatttggaggttccaggagccttcgctgttgggcatctgcctggtggcacctcagtgtctcctgaccccagtggttcctggtcctggttttcttgtcgtgggactgtggtgaaggtcagaaattaattgtttcctggaggctgttagaatcctgtttctgagaggccagtgactgagagttggtgacttggctggcatgagagagctgactctctggcatctgagcctgctgtcacctcaagctacaccatagggagtcacaactgcatccttgcagttctgtggggccccaggcactgctctcaagagggcattggatgcctaaagactattctttgaagtaaggaaaaggggtgctgtgcacctaaggggcaaggctagacagtggaatgacccccgctgagtgctaaacactggggcagcagggagagtgtcccattgcggggctgtcgtctgataagccctgtgggtcagggtgatgggctagggagtcagagctggtgtgtaggcagtgtactggggtgtatctaatctcactgtgccatgtgtgttctcagctccattgtctacctggagatcgacaaccggcaatgtgtgcagtcatcctcgcagtgcttccagagtgccaccgatgtggctgccttcctaggtgctcttgcgtcacttggcagcctcaatattccttacaagattgaggccgtgaagagtgagtaatcaggggctggagggatggctcggtggttaagagcactggctgctcttgcagaggacaagggttcaaatcccagcacccacgcagcatcttataactatgtgtaactctaattccagggcatccaacactttctgacctctgcaggcaccaggcatgcacagggtcctgacgtacatgcaggcaaaacacccatacacattacatattttttaaatgagttccctaccccgaccagccctgcctcttcagggatgggttcattgggtggcgggtcacaggcaggcggtctctcactccttgtgccagctgccattcccagctcaggaagtgcttttctggaatttttttccaaggccttccctccctgtggctagtgggagccgtaagtaaaagctgtcccctaagatgtatacatataccagaaagtatggaggagtctttcttctctcctcattctttacccctgatttttctttgttggatattatttcaaaatcattactagagtttttttgtgtgtgttattttttttaagagagagagagaattgatcggtgtcatgtgaagtgttgaagtttgtatcttgaaaatccccctaaatcctttgtcttaacagctcaatgcgagcgcagtgatttgaagttcgctaatcctccttctcgaaaggggagaagtgagcactgtctccagacagatcagctggtgcaggagagaatttagcgatagtttgcaattctgattaatcacgtagaaaatgaccttattttggggggtgggatggaggagagtgggtgaggaggcaccggccgtggagccagtcctccgccccccgccagcccacagcatcaccacgcctgacgaggggtgcttgcctgccgcccctgcccgcaggtgagccggtggagcctccgctgccctcgcagctgcacctcatgtacgtggcagcggccgccttcgtgctcctgttctttgtgggctgtggggtgctgctgtcccgcaagcgccggcggcagcatggccagctctggttccctgagggtttcaaagtgtcagaggccagcaagaagaagcggagagagcccctcggcgaggactcagtcggcctcaagtgagtggacactgctcccactgtgtgtgggtgagtgagtggcagggttggtgggggtgcttagctccagaaggcccatgggcccatccatccctgtccgttaccctaagcccttctgcatgtagaggatgcccatatgagctgtggcttcagggcatctcctggagtacctgctcagtctccctacccccatacccaggcccctgaagaatgcctcagatggtgctctgatggacgacaatcagaacgagtggggagacgaagacctggagaccaagaagttccgggtgagtcccgcaggctcccaagccccccctgggtggcacctcctgccttggccccaagtgatgaggctctgcttactctgtccacactcagtttgaggagccagtagttctccctgacctgagtgatcagactgaccacaggcagtggacccagcagcacctggacgctgctgacctgcgcatgtctgccatggccccaacaccgcctcagggggaggtggatgctgactgcatggatgtcaatgttcgaggaccaggtaaggccactggagacacatgcacacattccctagcatagacttaagaggccagtaggacttgaggagggctgggtcactgaagggctctgccagagcagcatcctgccctgagctgatcgtctggctcctcctgcccacacagtatactttttcatgaaatgctgctttgcaatagtcaaagtgttaatttttttttttttttttggtctcagtttttagtatgctgggattataggtgtgtccccatgcccagctaaagtgttgacttttaaaattatatgcatataggtgtatataaagatatcttttattttatgtgcatggttctgcctacatatatgtctgtgtagtgtttagatacccagtgcctgtggggagcctgaagaggccattggatcccctgaagctgcagttacagatggtagtgagcagctatatgggtactagggattgaactcaggtcctctggaagagaagccagtgctcttaaccactgagccatctctgcagcccttattttatgttttaaagcatttcttcatttgagtgtaaggggcacacatgtgccatagtacacacgtggaggtcagaggactacttgtatgagtgtgggttctctccttctaccatgttggtcccagagtgccttccagggaggcagcactgcatccctggggacttcatccggggtcccttaaactgcaggactgcctgccagggctatggttgaatgttgaccctccctgaggctgacaccatccttcccacacctacccttgtttctgtcctctctgcagatggcttcacacccctcatgattgcctcctgcagtggagggggccttgagacaggcaacagtgaagaagaagaagatgcacctgctgtcatctctgacttcatctaccagggcgccagcttgcacaaccagacagaccgcaccggggagaccgccttgcacttggctgcccgatactctcgttcagatgctgcaaagcgcttgctggaggccagtgcagatgccaacatccaggacaacatgggccgtactccgttacatgcagcagtttctgcagatgctcagggtgtcttccaggtacgcagcactgcatccttggagccagtgacctcatcaggtctgactggcatggaccctgcaatctctaattccaagtgtgactgggcagggaaacttggcacctccacactgcattttgaaggaagtccaggtacaaagggcatcaagtcccacctgtgttctctgagcaggctggctgaaggtggtcttgcggaacctacagggtgaggcagggcctccttactctcagtaaaaccctcccaatctcaaggctatggccttgacttgaggtctccacctccgtgctaaaacctttgcagactaaccctaccccattcagctgtggctgcaggcatagcccatggcggcagaaagagagctttagaggctgctggtcctggcctgcaaagctatctcctggctttgcctagaagcctggagccagcctgggtggatttaaggatttagctgcctgggtctgcagggaccaaccctagtagttgctcctgcatgttgccagccagtgacccctgctaccagacctgtcctctaggcggccctggagcaaactccaatggggaatagaccaggcatcaaaaagcttgtcatttaatcatttcttaacttgaaccacactttgtcggtctgtagaagaaattaaacaagacagggcaatgtacaccttttatcccagcactctagaatctgagaggattgtgagcatgaggctagcctggtcttcatagaaagaccctatttcaaaatagcaaagagaggttgagaccagccacaggttatgttgactgcctggtgtacagctctccacatggcctgccttgcttgcatagacagatgtgtgtacgttttgtaggaatccaggcagtgctgtgaatccttacccaggtcaccaacccactccctcctctcaccttaacagttccaagtacggctatgggccatgagcgggattcctagcctggttactctcccctctctcccccatgctatgcagtttgatttcctcaacctggaggtagttctggcaaccataaccaaaagatgaggtcccagtagatcccccactgtcactagggactgggtaagagccccagctcttgcacatggaatgtagctcctgccttcctcaggggctcagctgagcccagtccaggcattggtttctggagatacaggcttgcatttagatcaccctgcctgaacccatccctgccttccagatcctgctccggaacagggccacagatctggatgcccgaatgcatgatggcacaactccactgatcctggctgcgcgcctggccgtggagggcatgctggaggacctcatcaactcacatgctgacgtcaatgccgtggatgacctaggtaggcccgagctacagcccagctaccgaggacatcagccagtgcctggtctgctcagccccaacccactctctcctctctttgcttcctttccaggcaagtcggctttgcattgggcggccgcggtgaacaatgtggatgctgctgttgtgctcctgaagaacggagccaacaaggacatgcagaacaacaaggtaagcagacgggctgcttaaccgcaggcgcatgatggggactccggggcacccatacgttgaccacttagaggtttaagagtgtctgggacaacagcagcctaaaataacccgtgctcttgctggagaggagctgaggcgtaagcagctgtcccatgtcacggttacttgagccttgccttctgtccccttctgtccctggtggctgtggtgaccctaggggttcaggattggccaaggggcagggatggggtggccctgtctcttaaggcctgcaaggcttctggcttggtccaccactaccatgctccctcctttgggataagaaaactgctgagctgggctgcgtgtctccacctcgcctcccagtgtctctgtttgtgcagggctagttgcttcatcaggactctgcttagttgctcacagggcagagtttgtgcctcccttaccagctccactgcaggctgggaaatggagcaggagtcaggtacctggagttgctgttgggcacaggttctccacagtccagggtgggccagtggttatagagaatccaagcctgatagacattctgttgtggtgtatgattatgtctgctggacagagcagacctggaaggagctgagatgccctagccactggtgaccctttggcatggtagtaccttccccatggccattcacttgccttaaaggtccctgagtcccaggattgcagtacttgtgcctgcattttggggaggaaagcaaagggcacacagttacattctgttttcggcagtctgactccacacaggggaagaagccctatgtatttatcccacagatctctggggtgtgaggtgttaaatctaggttctctaaaaaaagaactcgggaccagccatgtgtgcgtgctagcaccgagaagctgaggcaggacgatactgagttccaagtacggctgtgggccctgagtgagattcctagcaacataggaaggccccactataaatactctctgagcctggtggtctaggatgcttgggtctagatagatctctccagataagagaagagaaagaggcagcacctgcttccctagcccctccccccaggccatccatcatcaatgactcagcaaattctacacctgcccgctccctcatgtacctcctgtccgtgtcctacaggaggagactcccctgttcctggccgcccgtgagggcagctatgagactgccaaagtgttgctggaccactttgccaaccgggacatcacggatcacatggaccgattgccgcgggacatcgcacaggagcgtatgcaccacgatatcgtgcggcttttggatgagtacaacctggtgcgcagcccacagctgcatggcactgccctgggtggcacacccactctgtctcccacactctgctcgcccaatggctacctgggcaatctcaagtctgccacacagggcaagaaggcccgcaagcccagcaccaaagggctggcttgtggtagcaaggaagctaaggacctcaaggcacggaggaagaagtcccaggatggcaagggctgcctgttggacagctcgagcatgctgtcgcctgtggactccctcgagtcaccccatggctacttgtcagatgtggcctcgccacccctcctcccctccccattccagcagtctccatccatgcctctcagccacctgcctggtatgcctgacactcacctgggcatcagccacttgaatgtggcagccaagcctgagatggcagcactggctggaggtagccggttggcctttgagccacccccgccacgcctctcccacctgcctgtagcctccagtgccagcacagtgctgagtaccaatggcacgggggctatgaatttcaccgtgggtgcaccggcaagcttgaatggccagtgtgagtggcttccccggctccagaatggcatggtgcccagccagtacaacccactacggccgggtgtgacgccgggcacactgagcacacaggcagctggcctccagcatagcatgatggggccactacacagcagcctctccaccaataccttgtccccgattatttaccagggcctgcccaacacacggctggcaacacagcctcacctggtgcagacccagcaggtgcagccacagaacttacagctccagcctcagaacctgcagccaccatcacagccacacctcagtgtgagctcggcagccaatgggcacctgggccggagcttcttgagtggggagcccagtcaggcagatgtacaaccgctgggccccagcagtctgcctgtgcacaccattctgccccaggaaagccaggccctgcccacatcactgccatcctccatggtcccacccatgaccactacccagttcctgacccctccttcccagcacagttactcctcctcccctgtggacaacacccccagccaccagctgcaggtgccagagcaccccttcctcaccccatcccctgagtcccctgaccagtggtccagctcctccccgcattccaacatctctgattggtccgagggcatctccagcccgcccaccaccatgccgtcccagatcacccacattccagaggcatttaaataaacagagatgtgggatgcaggaccccagcttccgttcccaagccctgttgggagtcctttccagtgcttcaggatgctggggcgaccaaaggagccttttaaaaaatgtttttatacaaaataagaggacaagaatttccattttttttttttagtatttatttatgtacttttattttccacagaaacactgcctttttatttatatgtattgttttctatggcactagggaaaaacatatctgttccaagaaaataaactagttctcagagccttgattttcctggtcagggtgaagttccctgtgtgtctgtaaaatatgaacaaggattcatgatttgtaaatgctgtttatttattgattgcttctttccaaaatcgaaaagaaagaaaaaagaacgtgacaggagaagggaagctggaaactgccatggccagaattgcccctcccccacactcactgcccctccccccagcgtcacctgggatttgcagatgtgtttagaaacacgcccagaccttgaaccttgggttcatggattagttttgtatctaaaacaggaaacaagtcagatgatgtggtttgtacactttctgtaaccaccagtgtggacttgaagaagtgtcctcagcatgtgcagagtctactacccagtaccagtcgtgagtctgcaggctccagtgttctgtagtagtgtttatgggccttgggagtacttctcccctgccctgccccactgtccccttcctgacaacttgagccagtaagccatgcagggtgtggtgcctcctagagaaaacactgcctggactgttctgtgcatccctccaaacagcatcatccaaatccaactgaggacagacggactgtcccggcctgggcctgggctcctaacacctgactgccaaagggctccaatgtgcattgtggactcgccagagtagcctgcattgagactccaagaaaacagaagctatgtggcctctgatccccaaactggcctgggtggggacatgccttgagtgtgctggaatgtgggtggagcctgcttctgggccacccctcctggttcagggctgtgctcacagcagattcttgcagtatcaagtatacgcctgtggcagaataagtatctgtaaatacatgtttaaagatggattttgtttaaaaaatctaaaggaacaagtgtgtcgtgtgtcaagctgatgaggactgtcagactgtggcttagctcagtgtgacccagaccttgtgacctgtagctgccgaaccagtagctcctaagagcacaacccaggatggcccatctgctgcccaccaagtccctttccagccactgtgtgctgggggctttcgggggcagttgcccacctcctcagggcagctctttctggccttttggggggcagtgtctgtgccatgcctaatagatatgaccagacgcatcctaagatgttgattcttactgtgttgtataaaataaagtgtagtttacaaaaaaaagaaacgtaaaaaaaaaaaactacatgcaaaactgtaggtaatgaaaatgatgtatttttttcatctttttttgttaactaatttgcaataaaaatgatactgatggttgtccacattttgctaaacttggagtgtggtttggttcactttttggggagtgtgacagagaaagggccacccagcactgaaataaccaaatccaaaccctctcttacacagaaatacagaggttgccataaggacacaccattttcagaagctgcacagcgcagggcatcaaggtgggaagacagtttccaaaagagttgatgcagtcctctcagggatgtggatctgattgatgccagctgtattcctgtgagcagcagaggagtgaaggcaccttatgttgtcatagatgactatcctctgagcccagtaacccccaacctcttcaaattcagccatgccttgcaaaaggtcatcccagctgtgcttgttgactgcttatagaccccctcaaagagttgggaaggtcatgggactcaaaggacccttgcctgatgatccagtcactttgttgtatgcagtcctgccctaattgtgcatgacctcagggaggtactagagtatatagtctgggaagactagtggagagactccatctatgtggctgtgaggaaagccttatccctgctgggtaaatgttgtattaatattcatttaataaaggctgggcgtggtggcacacgcctttaatcctagcactcaggaggcagaggcaggtggatttatgagttcgaggccagcctggtctacagagtgagttccaggacagccagggctatacagagaaaccctgtctcgaaaaaccaaaaaaaaaaaaaaaaaaaaaaaaaaaaaattcatttaataaatcctggcagcaggtcactatccaactcaatggtttatgaaagacacacaacctttctttatattttattatgtcttattcagcacaatagctgggtagctgcctagcctccatattgctaagactctgtctccccattctgaattcctgcttactaattctatgttctatcgtggctgatctagaccaagttgggcagccttataggccatgctctcccagctccttcaggtggtagccttgcctctctgtcctgcactcttcccaggcatggcatctctcctctccccaactctcccttctcccactgcctcaagtctcaagcccaggagtcctaaacggtccaccttgtctgtcctccccagctactggctattggtatctttatttaccaatcagaacccactggggacaggttcccaaaagctatgtgtagaccttcctgtgcagttcgggggaacattaacatttgtaatacaaacagctacaagtaaagagttccaatgtggactcagtaagtaaccctttacctatgttctgctcttgtcagcgctgcaaatccattggtgccctagtcagctttggtgcctaggaccttaggaggagggttaagtgttgtctcttcctgggaaggaattttagcaacactcatctagtccgagagcccagcaggtacaaaggcatcttagccctaagaagaaatcataatagcacaggtgtggatctcccttggcctgctgtactggctagttttgtgtcaacttgacacagctggagttatcacaaagaaaggagtttcagttggggaaatgcctccacgagatccagctgtaaggcattttctcttagtgatcaaggggggaagggccctttgtgggtggtaccatctctgggctggtagtcttgggttctataagagagcaagctgagcaagccaggggaaccaagccagtaaagaacatccctccatggcctctgcatcagttcctgctccctgacctgcttgagttccagtcctgacttccttggtgatgaacagcagtatggaagtgtaagccgaataaaccctttcctccccaacttgtttcttgctcatgatgtttgtgcaggaatagaaaccctgactaagacacctgcctaggcctctccatttggcccacaccttggagcacagcaggagtctctaaccaaagtgacaatggggaatgtgatgccctctctgagcctgacatctgaggacaagtgtgaatccatcaagttcagatgtcttgccccggctcagtgttgcacactgtgaaagcggagggggcccaggggcccagaaggggtgctcacacacagaattgtgataacttgtctcattcttgccctcaaggggaaggtcggagcctgaattctgcccggagaactagcatctccaaaattccatccggaatggaaatgtcagctcggaaagggcttagcaggctcatatgcctgggtgttctctagagcatcatccacaatggcatgtgcagcccagggttcacaactgatggctggaccactgagaacacatctggactgggttcggggtgaaaaacattgatgtttgcagatcaaagcaagggcctacccatgtgggcaaatcttctccagtgagagaccaaacaacaaaaggtcagggaagaggggatggatcctgcctactgcggcagaacatgaatcctctcccctccaggctcccacggaaagattgcctgttcttgggtctccagcttgccaggtacagctctggggacttgccaaccccacaacctctctttgtatctaccctagtaaacattcagtggagtatttttcagccattagaaggaacaaagctctgagacctactaacatgtgggtgagctgcaggaggacacagggctcgtgaaagacatctcaaaaatgaccacatgatttcatctttatgaaatgtcctcagtaagtaaagccacaaagacagagaacagagtggccattcctgggtccagggaaatgggtatgactgacaatgcctatacatttgactttgcatggatagtccagcactgtgtacgtctaaggcagaaggctgcatggcactgtgaaggtcccagacccgtcaatgctagaattccacaatctgtgagtctactaaaactagcaaaaaaaaaaaaaaaaaaaaaatccaagcaaaatgggaactttcagaaatttgtcccatggacacaacaagttctcttttattttgtgacaggatcttgctgggtatcccaggttggcctcaatctcaccatcctcctgcctcaatctcccaagtgttgggattctaggtgtgtaccacgccacccacttaaacctagtactcttaaggagcatctatctgcccctaaaagccactggaaataaataaaacatgtaaaacaatatttttaaagggctaaagatgtagcctagtagtagagggtttgtttactctgtgcaaggctctggatttcatccccaggaccaaataaagtaatcaataaattggcttgagacaaccttcaataaattccttgttctatgaacctgagctcctcattttgagtcatgtaaaaaagttgggtatgatcatgtgctgtaatcccagcatctgtgagatggggaggtagagatcggtagagtcctacttagcttttgtctaatcagtgagtcgcaggtcccagtgagagaccttgtctcaaaaactaaaaacaaaaaggccgaggactggggagatggctcagatagtaaaaattcctactgcactagcacaaagacctgagtttggaatctccagcatccacatgctgtcctggaatgaccatacatctgtaatcctgtgctggggtggggagggagacaagatcctggagcaccacttgcctagccaatgatcaatcaagcactaggtccagtgagagagaccctgccccaaaaaccaggatggagtcaggcattgtggcacatgtttaaccccaacattcaggagacagaggcccagggctaaaatagtctctgtctcaaaaacaaactaaaaaaccaagctgagaatgagaatgataccttctggcttccacatgccatatatacatatacatgctcacacgcacaggcacacacatatgcacagtgtaaggactaaattgggcacccagcagctagacagcccagagagaaaatagagtcttgcagcctcagccttcctttgtttaggggggattacaggacagtgggccctgctgtctctcaacagaaatactccaggaccaaatcccaagcagacagaggtatggagatgagctctgtgtcatacacacactgaagatggtcatatacagacatgggagcagaggcaactgagtggtcttggagcaacttgccctgtggtacccggtcacagacctccaggacaaggaaattcctgtgaaatccaactggtgtggggctgtttacacagcaacctggatagattgatccagtctcgggctgaggtgatgtcttggatgccgaaatctctcagggacacaggccagttcagttccctaggtactgcctttcccccacaatgaaatgccatctgtgctggctagctgtaacacatcaacttgacacacaaactacagagttatctgagaggaagaaaccataattgagaaaatgccactgtaagatctggctgtaagacattttcttaattagtgattgatggaggagggccagcttatggtcctgagttctataagaaagtaggctgagcaagccatgggaaacaagccaataagcagcacccctccatgacctctgtctgtatcagcttctgcctctaggatcctgccctgagttcctgtcctgactttcttcagtgatgaacagtgctgtcaaagtgtaagcctaagaactcctttcccctccaacttgttttttggtcgttgtttcatcacagcaataaaaaccttaactaagacaccaccactccccagggatctgccatcttgtaatgtttttgtttgttttcaatttagaagaatagttattatgtatatactactagagggcagtgagttaggcagtagtgagtaagcaggggcacactacgtcctctggctggctgaaccttgtgatccttctgcctcagcctcctgagttctaggattgcaggtatgccccaccaggcttgactttaagtcctacttttcaacattcaagtatgtaagtagttccagacaagtatggtaaatccaacactctagaggctgaggcaggaggactgccataagttcaaggccagcctgagttatatagctaacttctgtttcaaaaataacaaaagcagatataaataacccgagaacagcctggtggtggtgttgcacacccttaatcccagcactcaggaggcaggcggaggtaaatttcttgagttccaggccagcctggtctacagagtgagtttcaggacagccagggctacaaggagaaaccctgtctcaaaaaactgaaaccaaaccaaatagcaacaaaaacaaacccaagaactagttctcttcctgtcccaagtgtccttcgctccactgtctgtgtatatcttcagtatgagagagaagggcttccttagcctcctggggtcattcagagaagcccattccaatagaaataagacggaaaccacataggtcattcaaagtacttcataacccttaaaaaggtcaaaggagcaggtgaatttatttcaatactacatcttggttcgtccaatgaaaccacagttaccacttaactagcagtcaacacaagcgaagtatgaaaaggacagagttgacattctttgtattattatttgtatttatttgcttatgtatatgtgtgctaacacatgccatacatgtagaggtcagaggacaagtgatgagagccagtctctccctctaccatgtgggtcctagggactgaacctgggttgtcctccttggcagcaggcacccttacccactgtgccagctcacctgcattatcaccatctgcactggccatgctgaaggtgcttagaggccacacatggtcaaaatgtcatcccagacaggctaatctccaccagcacagataaacaacccatggagccagatgtagtactgggagcactggggggcgaaggggaggacggtaaaggcaggaggttcaggagttctaagccagatcctgtctataaagatgtaagcaaaggaataaagaaggtgaggggagagactgctatgctggtgttgtttcttgtcaaaggaggcaccaaatgtggctctgcattgctttgtccagcacaaagagggacccaagggtattagtgccataaacccagccaaagcagcagggttatgcctacaatcaaaagtgatggagtgctgctgtccttctgagactccgggaaccagccagccatgagtcttgcaaagtttgctatcagggacactctatggggagatttttactatgtgactccagaccccaccctgtggagctgtggagacccaggccaatcctcagctgcatacgagttaggaaacagggctcttttactacagtatcctcaagcccgactgagctatgtgtactgtggatttcgaaaggtttgtgtggagcttctccagagaatccctctgttttgaagatcaaggacagggatgctgctctctccacctgcactttaaagatgatgtggtcctgtcctaattcctgaccaccctcacgggtggtgttctcatggactacctggcagctgtgggatagaaggtccctagagtgtcctcctgtgtgaggggtgacctccaaggtctatgtgtggatgctttggccatctgtgtagaactcacttctggtaaggacccagaaatagcatggctattgttatcacaatggattttaagaacattccttagcagccaagcccagcatacacagtcactggtcaccacaaactcattgagagatggtgtcttagttagggttttactactgtgaacagatattatgagcaaggcaactcttttttttttaaagatttatttattattatatgtaaatacactgtagctgtcttcagacattccatagtagggcatcagatctcattgtggatggttgtgaactaccatgtggttgctgggatttgaactcagtacctttggaagagcagtcagtgctcttacccgctgagccatctcactagccctgatcaaggcaactcttataaaaacaacatttaattggggctggcttacaggttctgaggttcagtccattatcatcaaggcaggaacatggcagcattcaggcagacatggtacagaaggagctgagagttctacaacttcatctgaaggccactaggagaaggccactgacttccaggcagctaggacaagggtattaaggcccacaaccacagtgacacacccactccaaaaaggtcacacctcctaataatgccactccctgggctgagcatatataaaccatcacagatggccaagaatggttgcttcaatgcttttatgtgcacataccacctagagtgttccacaaagttcagggttcagagctttcacacaactttgacctcaaggcttatttttagattctagtgcttgtgagatccattctctacaacaccatgctatttctatgactatttcaaatacaagactgtgttatgccgggtgtggtggtacatgcctttaatcccagcactcaggaggcagagtcagccggatttctgagttcgaggtcagcctggtctacaaagtgagttccaggacttccagggctacacagagaaaccctgtctcgaaccccgaaccccccctccgccccccaaaaaagacgactgtgttctgtttctcatgagattcttctgcatggggtgagcatgctttctactggagctgtggacactctggcactcagaaacaagtctgacctaagctacttatttactccccatcaatacaatcttcttaagctggaaaagggaaggggagagaaaaggtctctgaccttagcctcagcaggccaggtggaaggggtgacacagaacaaggccctttcctctaccttgaaagcaatgccacaggctcccacaaggttgaggattctgtctctgacctcagagcttggaaatccattgtcttctctgactccaatgtgctcaactcagagagcatttatgcagcacctgctatctttagtaagcccaccccctccagggagtccagaagtaaagacttccctctgcgagggctgctctgtgtgtgtgtgtgtgtgtgtgtgtgtgtgtgtgtggttaggggggtctgcagggtatgcaacacctgcacctaactcaagtgagataggatctggaaggagccctcaatggatggataatttgtaggtagatttgtaggtggctctnnnnnnnnnnnnnnnnnnnnnnnnnnnnnnnnnnnnnnnnnnnnnnnnnnnnnnnnnnnnnnnnnnnnnnnnnnnnnnnnnnnnnnnnnnnnnnnnnnnnnnnnnnnnnnnnnnnnnnnnnnnnnnnnnnnnnnnnnnnnnnnnnnnnnnnnnnnnnnnnnnnnnnnnnnnnnnnnnnnnnnnnnnnnnnnnnnnnnnnnnnnnnnnnnnnnnnnnnnnnnnnnnnnnnnnnnnnnnnnnnnnnnnnnnnnnnnnnnnnnnnnnnnnnnnnnnnnnnnnnnnnnnnnnnnnnnnnnnnnnnnnnnnnnnnnnnnnnnnnnnnnnnnnnnnnnnnnnnnnnnnnnnnnnnnnnnnnnnnnnnnnnnnnnnnnnnnnnnnnnnnnnnnnnnnnnnnnnnnnnnnnnnnnnnnnnnnnnnnnnnnnnnnnnnnnnnnnnnnnnnnnnnnnnnnnnnnnnnnnnnnnnnnnnnnnnnnnnnnnnnnnnnnnnnnnnnnnnnnnnnnnnnnnnnnnnnnnnnnnnnnnnn

SEQ ID NO: 56 - DNA, 8064 bp, Mus musculus
gtggtgtgcgtcaacgtccgatccccgccggccaccccaagaggccgccgccgggctgcgggcagctggcgagcaggcatgccacggctcctgacgccccttctctgcctaacgctgctgcccgcgcgcgccgcaagaggcttgagatgctcccagccaagtgggacctgcctgaatggaggtaggtgcgaagtggccagcggcactgaagcctgtgttgccagcggcagctttgtgggccaacgatgccaggaccccaatccttgcctcagcacacggtgtaagaatgctggaacgtgctatgttgtggaccatggtggcatcgtggactatgcctgcagctgtcccctgggtttctctgggcccctctgcctgacacctctggacaagccctgcctggccaacccctgccgcaatgggggcacctgtgacctgctcactctcacagagtacaagtgccgctgctctccagggtggtcaggaaaatcatgtcagcaggctgacccctgtgcctccaacccctgtgccaatggtggccagtgcctgccctttgagtcttcatacatctgtcgctgcccgcctggcttccatggccccacctgcaggcaagatgttaatgagtgcagccagaaccctgggctgtgccgccatggaggccactgccacaatgagatcggctcctatcgctgtgcctgctgtgccacccatactggtccccactgtgaactgccctatgtgccctgcagcccctcaccctgccagaatggagcaacctgccgtcctacaggggacaccacccacgagtgtgcctgcttgccaggttttgctggacagaactgtgaagaaaatgtggatgactgtccaggaaacaactgcaagaatgggggtgcctgtgtggacggcgtgaatacctacaattgccgctgcccaccggaggtgacgggtcagtactgtacagaggatgtggacgaatgtcagctcatgccaaatgcctgccagaatgcgggaacctgccacaacacacacggcggctacaactgtgtgtgtgtcaatgggtggactggcgaggactgcagtgagaacattgatgactgtgccagtgccgcctgtttccagggtgccacttgccacgaccgtgtggcttccttctactgcgaatgtccgcatgggcgcacaggtctgctgtgccacctcaagcatgcgtgcatcagcaacccctgcaacgagggctccaactgtgacaccaaccctgtcaacggcaaacgaatctgcacctgcccctcggggtacacagggccagcctgcagccaggacgtggatgagtgtgatctgggtgccaaccgttgtgagcacgcaggcaaatgcctcaacacactgggttcttttgagtgccagtgtctacagggctacacgggacccggctgtgagattgatgttaatgagtgcatctccaacccatgtcagaatgacgccacttgcctggaccagattggggagttccaatgcatatgtatgccaggttatgaaggtgtatactgtgaaatcaacacggatgagtgcgccagcagcccctgtctgcacaatggccactgcatggacaagatccatgagttccaatgtcagtgccccaaaggcttcaacgggcacctgtgccagtatgatgtggatgagtgtgccagcacaccatgcaagaacggtgccaagtgcctggatgggcccaacacctatacctgcgtgtgtacagaaggttacacagggacccactgcgaagtggacattgacgagtgtgaccctgacccctgccactatggttcctgtaaggatggtgtggccacctttacctgcctgtgccagccaggctacacaggccatcactgtgagaccaacatcaatgagtgccacagccaaccgtgccgccatgggggcacctgccaggaccgtgacaactcctacctctgcttatgcctcaagggaaccacagggcccaactgtgagatcaacctggatgactgcgccagcaacccctgtgactctggcacctgtctggacaagattgatggctacgaatgtgcctgtgaaccaggctacacaggaagcatgtgtaacgtcaacattgacgaatgtgcgggcagcccctgccacaacgggggcacttgtgaggatggcatcgcgggcttcacttgccgctgccccgagggctaccatgaccccacgtgcctgtccgaggtcaacgagtgcaacagtaacccctgcatccacggagcttgccgggatggcctcaatgggtacaagtgtgactgtgcccctgggtggagtggaacaaactgtgacatcaacaacaacgagtgtgagtccaacccttgtgtcaacggtggcacctgcaaggacatgaccagtggctacgtatgcacctgccgagaaggcttcagtggccctaattgccagaccaacatcaacgaatgtgcctccaacccctgcctgaaccaggggacctgcattgatgatgtcgctggatacaagtgcaactgtcctctgccatatacaggagccacgtgtgaggtggtgttggccccatgtgctaccagcccctgcaaaaacagcggcgtatgcaaggagtctgaagactatgagagtttctcctgtgtctgtcccacaggctggcaaggtcaaacctgcgaggttgacatcaatgagtgtgtgaaaagcccatgtcgccatggggcctcctgccagaacaccaatggcagctaccgctgcctctgccaggccggctatacaggtcgcaactgtgagagtgacatcgatgactgccgccccaacccgtgtcacaatgggggttcctgcaccgatggcatcaacacagccttctgcgactgcctgcccggcttccagggtgccttctgtgaggaggacatcaatgaatgtgccagcaatccctgccaaaatggagccaattgcactgactgtgtggacagctacacatgtacctgccccgtgggcttcaatggcatccactgcgagaacaacacacctgactgtactgagagctcctgcttcaatggtggtacctgtgtggatggtatcaactccttcacctgtctgtgtccacctggcttcacgggcagctactgtcagtatgatgtcaatgagtgtgattcacggccctgtctgcacggtggtacctgccaagacagctatggtacttataagtgtacctgcccacagggctacactggtctcaactgccagaaccttgtgcgctggtgcgactcggctccctgcaagaatggtggcaggtgctggcagaccaacacgcagtaccactgtgagtgccgcagcggctggactggcgtcaactgcgacgtgctcagtgtgtcctgtgaggtggctgcacagaagcgaggcattgacgtcactctcctgtgccagcatggagggctctgtgtggatgagggagataaacattactgccactgccaggcaggctacacgggcagctactgtgaggacgaggtggacgagtgctcacctaacccctgccagaatggagctacctgcactgactatctcggcggcttttcctgcaagtgtgtggctggctaccatgggtctaactgctccgaggagatcaacgagtgcctgtcccagccctgccagaatgggggtacctgcattgatctgaccaactcctacaagtgttcctgcccccgggggacacagggtgtacactgtgagatcaatgttgatgactgccatcccccccttgaccctgcctcccgaagccccaagtgcttcaacaatggcacctgtgtggaccaggtgggtggctatacctgcacctgcccaccaggcttcgtcggggagcggtgtgagggtgatgtcaatgaatgtctctccaacccctgtgacccacgtggcacccagaactgtgtgcagcgtgttaatgacttccactgcgagtgccgggctggccacactggacgccgctgtgagtcagtcatcaatggctgcaggggcaaaccttgcaagaatgggggtgtctgtgccgtggcctccaacaccgcccgtggattcatctgtaggtgccctgcgggcttcgagggtgccacatgtgagaatgatgcccgcacttgtggcagcttacgctgtctcaacggtggtacatgcatctcgggcccacgtagtcccacctgcctatgcctgggatccttcaccggccctgagtgccagttcccagccagcagcccctgtgtgggtagcaacccctgctacaatcagggcacctgtgagcccacatccgagaaccctttctaccgctgtctatgccctgccaaattcaacgggctactgtgccacatcctggactacagcttcacaggtggcgctggcccggacattcccccaccgcagattgaggaggcctgtgagctgcctgagtgccaggtggatgcaggcaataaggtctgcaacctgcagtgtaataatcacgcatgtggctgggatggtggcgactgctccctcaacttcaatgacccctggaagaactgcacgcagtctctacagtgctggaagtattttagcgacggccactgtgacagccagtgcaactcggccggctgcctctttgatggcttcgactgccagctcaccgagggacagtgcaaccccctgtatgaccagtactgcaaggaccacttcagtgatggccactgcgaccagggctgtaacagtgccgaatgtgagtgggatggcctagactgtgctgagcatgtacccgagcggctggcagcgggcaccctggtcctggtggtgctgcttccacccgaccagctacggaacaactccttccactttctgcgggagctcagccacgtgctgcacaccaacgtggtcttcaagcgtgatgcgcaaggccagcagatgatcttcccgtactatggccacgaggaagagctgcgcaagcacccaatcaagcgctctacagtgggttgggccacctcttcactgcttcctggtaccagtggtgggcgccagcgcagggagctggaccccatggacatccgtggctccattgtctacctggagatcgacaaccggcaatgtgtgcagtcatcctcgcagtgcttccagagtgccaccgatgtggctgccttcctaggtgctcttgcgtcacttggcagcctcaatattccttacaagattgaggccgtgaagagtgagccggtggagcctccgctgccctcgcagctgcacctcatgtacgtggcagcggccgccttcgtgctcctgttctttgtgggctgtggggtgctgctgtcccgcaagcgccggcgccagcatggccagctctggttccctgagggtttcaaagtgtcagaggccagcaagaagaagcggagagagcccctcggcgaggactcagtcggcctcaagcccctgaagaatgcctcagatggtgctctgatggacgacaatcagaacgagtggggagacgaagacctggagaccaagaagttccggtttgaggagccagtagttctccctgacctgagtgatcagactgaccacaggcagtggacccagcagcacctggacgctgctgacctgcgcatgtctgccatggccccaacaccgcctcagggggaggtggatgctgactgcatggatgtcaatgttcgaggaccagatggcttcacacccctcatgattgcctcctgcagtggagggggccttgagacaggcaacagtgaagaagaagaagatgcacctgctgtcatctctgacttcatctaccagggcgccagcttgcacaaccagacagaccgcaccggggagaccgccttgcacttggctgcccgatactctcgttcagatcgtcgaaagcgccttgaggccagtgcagatgccaacatccaggacaacatgggccgtactccgttacatgcagcagtttctgcagatgctcagggtgtcttccagatcctgctccggaacagggccacagatctggatgcccgaatgcatgatggcacaactccactgatcctggctgcgcgcctggccgtggagggcatgctggaggacctcatcaactcacatgctgacgtcaatgccgtggatgacctaggcaagtcggctttgcattgggcggccgcggtgaacaatgtggatgctgctgttgtgctcctgaagaacggagccaacaaggacatcgagaacaacaaggaggagacttccctgttcctgtcgatccgccgtgagagctatgagactgccaaagtgttgctggaccactttgccaaccgggacatcacggatcacatggaccgattgccgcgggacatcgcacaggagcgtatgcaccacgatatcgtgcggcttttggatgagtacaacctggtgcggtccccacagctgcatggcactgccctgggtggcacacccactctgtctcccacactctgctcgccaaatggctaccctggcaatctcaagtctgccacacagggcaagaaggcccgcaagccaagcaccaaagggctggcttgtggtagcaaggaagctaaggacctcaaggcacggaggaagagttcccaggatggcaagggctggctgttggacagctcgtcgagcatgctgtcgcctgtggactccctcgagtcaccccatggctacttgtcagatgtggcctcgcaccccctcctcccctccccattccagcagtctccatccatgcctctcagccacctgcctggtatgcctgacacccacctgggcatcagccacttgaatgtggcagccaagcctgagatggcagcactggctggaggtagccggttggcctttgagcaccccccgccacgcctctcccacctgcctgtagcctccagtgcctgcacagtgctgagtaccaatggcaccggggctatgaatttcaccgtgggtgcaccggcaagcttgaatggccagtgtgagtggcttccccggctccagaatggcatggtgcccagccagtacaacccactacggccgggtgtgacgccgggcacactgagcacacaggcagctgggctccagcatagcatgatggggccactacacagcagcctctccaccaataccttgtccccgattatttaccagggcctgcccaacacacggctggcaacacagcctcacctggtgcagacccagcaggtgcagccacagaacttaccactccagccacagaacttacagccaccatcacagccacacctcagtgtgagctcggcagccaatgggcacctggggcggagcttcttgagtggggagcccagtcaggcagatgtacaaccgctgggccccagcagtctgcctgtgcacaccattctgccccaggaaagccaggccctaccaacatcactgccatcctccatggtcccacccatgaccactacccagttcctgacccctccatcacagcacagttactcctcctcccctgtggacaacacccccagccaccagctgcaggtgccagagcccactttcctcaccccatcccctgagtcccctgaccagtggtccagctcctccccgcattccaacatctctgattggtccgagggcatctccagcccgcccaccaccatgccgtcccagatcacccacattccagaggcatttaaataaacagagatgtgggatgcaggaccccagcttccgttcccaagccctgttggaagtcctttccagtgcttcaggatgctggggcgaccaaaggagctttttaaaaaatgtttttatacaaaataagaggacaagaatttcatttttttttttagtatttatttatgtacttttattttccacagaaacactgcctttttatttatatgtattgttttctatggcactaggggaaaaacatatctgttccaagaaaataaactagttctcagagccttgattttcctggtcagggtgaagttccctgtgtgtctgtaaaatatgaacaaggattcatgatttgtaaatgctgtttatttattgattgcttctttccaaaatcgaaaaaaaaaa

SEQ ID NO: 57 - DNA, 7596 bp, Mus musculus
atgccacggctcctgacgccccttctctgcctaacgctgctgcccgcgcgcgccgcaagaggcttgagatgctcccagccaagtgggacctgcctgaatggaggtaggtgcgaagtggccagcggcactgaagcctgtgttgccagcggcagctttgtgggccaacgatgccaggaccccaatccttgcctcagcacacggtgtaagaatgctggaacgtgctatgttgtggaccatggtggcatcgtggactatgcctgcagctgtcccctgggtttctctgggcccctctgcctgacacctctggacaagccctgcctggccaacccctgccgcaatgggggcacctgtgacctgctcactctcacagagtacaagtgccgctgctctccagggtggtcaggaaaatcatgtcagcaggctgacccctgtgcctccaacccctgtgccaatggtggccagtgcctgccctttgagtcttcatacatctgtcgctgcccgcctggcttccatggccccacctgcaggcaagatgttaatgagtgcagccagaaccctgggctgtgccgccatggaggccactgccacaatgagatcggctcctatcgctgtgcctgctgtgccacccatactggtccccactgtgaactgccctatgtgccctgcagcccctcaccctgccagaatggagcaacctgccgtcctacaggggacaccacccacgagtgtgcctgcttgccaggttttgctggacagaactgtgaagaaaatgtggatgactgtccaggaaacaactgcaagaatgggggtgcctgtgtggacggcgtgaatacctacaattgccgctgcccaccggaggtgacgggtcagtactgtacagaggatgtggacgaatgtcagctcatgccaaatgcctgccagaatgcgggaacctgccacaacacacacggcggctacaactgtgtgtgtgtcaatgggtggactggcgaggactgcagtgagaacattgatgactgtgccagtgccgcctgtttccagggtgccacttgccacgaccgtgtggcttccttctactgcgaatgtccgcatgggcgcacaggtctgctgtgccacctcaagcatgcgtgcatcagcaacccctgcaacgagggctccaactgtgacaccaaccctgtcaacggcaaacgaatctgcacctgcccctcggggtacacagggccagcctgcagccaggacgtggatgagtgtgatctgggtgccaaccgttgtgagcacgcaggcaaatgcctcaacacactgggttcttttgagtgccagtgtctacagggctacacgggacccggctgtgagattgatgttaatgagtgcatctccaacccatgtcagaatgacgccacttgcctggaccagattggggagttccaatgcatatgtatgccaggttatgaaggtgtatactgtgaaatcaacacggatgagtgcgccagcagcccctgtctgcacaatggccactgcatggacaagatccatgagttccaatgtcagtgccccaaaggcttcaacgggcacctgtgccagtatgatgtggatgagtgtgccagcacaccatgcaagaacggtgccaagtgcctggatgggcccaacacctatacctgcgtgtgtacagaaggttacacagggacccactgcgaagtggacattgacgagtgtgaccctgacccctgccactatggttcctgtaaggatggtgtggccacctttacctgcctgtgccagccaggctacacaggccatcactgtgagaccaacatcaatgagtgccacagccaaccgtgccgccatgggggcacctgccaggaccgtgacaactcctacctctgcttatgcctcaagggaaccacagggcccaactgtgagatcaacctggatgactgcgccagcaacccctgtgactctggcacctgtctggacaagattgatggctacgaatgtgcctgtgaaccaggctacacaggaagcatgtgtaacgtcaacattgacgaatgtgcgggcagcccctgccacaacgggggcacttgtgaggatggcatcgcgggcttcacttgccgctgccccgagggctaccatgaccccacgtgcctgtccgaggtcaacgagtgcaacagtaacccctgcatccacggagcttgccgggatggcctcaatgggtacaagtgtgactgtgcccctgggtggagtggaacaaactgtgacatcaacaacaacgagtgtgagtccaacccttgtgtcaacggtggcacctgcaaggacatgaccagtggctacgtatgcacctgccgagaaggcttcagtggccctaattgccagaccaacatcaacgaatgtgcctccaacccctgcctgaaccaggggacctgcattgatgatgtcgctggatacaagtgcaactgtcctctgccatatacaggagccacgtgtgaggtggtgttggccccatgtgctaccagcccctgcaaaaacagcggcgtatgcaaggagtctgaagactatgagagtttctcctgtgtctgtcccacaggctggcaaggtcaaacctgcgaggttgacatcaatgagtgtgtgaaaagcccatgtcgccatggggcctcctgccagaacaccaatggcagctaccgctgcctctgccaggccggctatacaggtcgcaactgtgagagtgacatcgatgactgccgccccaacccgtgtcacaatgggggttcctgcaccgatggcatcaacacagccttctgcgactgcctgcccggcttccagggtgccttctgtgaggaggacatcaatgaatgtgccagcaatccctgccaaaatggagccaattgcactgactgtgtggacagctacacatgtacctgccccgtgggcttcaatggcatccactgcgagaacaacacacctgactgtactgagagctcctgcttcaatggtggtacctgtgtggatggtatcaactccttcacctgtctgtgtccacctggcttcacgggcagctactgtcagtatgatgtcaatgagtgtgattcacggccctgtctgcacggtggtacctgccaagacagctatggtacttataagtgtacctgcccacagggctacactggtctcaactgccagaaccttgtgcgctggtgcgactcggctccctgcaagaatggtggcaggtgctggcagaccaacacgcagtaccactgtgagtgccgcagcggctggactggcgtcaactgcgacgtgctcagtgtgtcctgtgaggtggctgcacagaagcgaggcattgacgtcactctcctgtgccagcatggagggctctgtgtggatgagggagataaacattactgccactgccaggcaggctacacgggcagctactgtgaggacgaggtggacgagtgctcacctaacccctgccagaatggagctacctgcactgactatctcggcggcttttcctgcaagtgtgtggctggctaccatgggtctaactgctccgaggagatcaacgagtgcctgtcccagccctgccagaatgggggtacctgcattgatctgaccaactcctacaagtgttcctgcccccgggggacacagggtgtacactgtgagatcaatgttgatgactgccatcccccccttgaccctgcctcccgaagccccaagtgcttcaacaatggcacctgtgtggaccaggtgggtggctatacctgcacctgcccaccaggcttcgtcggggagcggtgtgagggtgatgtcaatgaatgtctctccaacccctgtgacccacgtggcacccagaactgtgtgcagcgtgttaatgacttccactgcgagtgccgggctggccacactggacgccgctgtgagtcagtcatcaatggctgcaggggcaaaccttgcaagaatgggggtgtctgtgccgtggcctccaacaccgcccgtggattcatctgtaggtgccctgcgggcttcgagggtgccacatgtgagaatgatgcccgcacttgtggcagcttacgctgtctcaacggtggtacatgcatctcgggcccacgtagtcccacctgcctatgcctgggatccttcaccggccctgagtgccagttcccagccagcagcccctgtgtgggtagcaacccctgctacaatcagggcacctgtgagcccacatccgagaaccctttctaccgctgtctatgccctgccaaattcaacgggctactgtgccacatcctggactacagcttcacaggtggcgctggcccggacattcccccaccgcagattgaggaggcctgtgagctgcctgagtgccaggtggatgcaggcaataaggtctgcaacctgcagtgtaataatcacgcatgtggctgggatggtggcgactgctccctcaacttcaatgacccctggaagaactgcacgcagtctctacagtgctggaagtattttagcgacggccactgtgacagccagtgcaactcggccggctgcctctttgatggcttcgactgccagctcaccgagggacagtgcaaccccctgtatgaccagtactgcaaggaccacttcagtgatggccactgcgaccagggctgtaacagtgccgaatgtgagtgggatggcctagactgtgctgagcatgtacccgagcggctggcagcgggcaccctggtcctggtggtgctgcttccacccgaccagctacggaacaactccttccactttctgcgggagctcagccacgtgctgcacaccaacgtggtcttcaagcgtgatgcgcaaggccagcagatgatcttcccgtactatggccacgaggaagagctgcgcaagcacccaatcaagcgctctacagtgggttgggccacctcttcactgcttcctggtaccagtggtgggcgccagcgcagggagctggaccccatggacatccgtggctccattgtctacctggagatcgacaaccggcaatgtgtgcagtcatcctcgcagtgcttccagagtgccaccgatgtggctgccttcctaggtgctcttgcgtcacttggcagcctcaatattccttacaagattgaggccgtgaagagtgagccggtggagcctccgctgccctcgcagctgcacctcatgtacgtggcagcggccgccttcgtgctcctgttctttgtgggctgtggggtgctgctgtcccgcaagcgccggcgccagcatggccagctctggttccctgagggtttcaaagtgtcagaggccagcaagaagaagcggagagagcccctcggcgaggactcagtcggcctcaagcccctgaagaatgcctcagatggtgctctgatggacgacaatcagaacgagtggggagacgaagacctggagaccaagaagttccggtttgaggagccagtagttctccctgacctgagtgatcagactgaccacaggcagtggacccagcagcacctggacgctgctgacctgcgcatgtctgccatggccccaacaccgcctcagggggaggtggatgctgactgcatggatgtcaatgttcgaggaccagatggcttcacacccctcatgattgcctcctgcagtggagggggccttgagacaggcaacagtgaagaagaagaagatgcacctgctgtcatctctgacttcatctaccagggcgccagcttgcacaaccagacagaccgcaccggggagaccgccttgcacttggctgcccgatactctcgttcagatcgtcgaaagcgccttgaggccagtgcagatgccaacatccaggacaacatgggccgtactccgttacatgcagcagtttctgcagatgctcagggtgtcttccagatcctgctccggaacagggccacagatctggatgcccgaatgcatgatggcacaactccactgatcctggctgcgcgcctggccgtggagggcatgctggaggacctcatcaactcacatgctgacgtcaatgccgtggatgacctaggcaagtcggctttgcattgggcggccgcggtgaacaatgtggatgctgctgttgtgctcctgaagaacggagccaacaaggacatcgagaacaacaaggaggagacttccctgttcctgtcgatccgccgtgagagctatgagactgccaaagtgttgctggaccactttgccaaccgggacatcacggatcacatggaccgattgccgcgggacatcgcacaggagcgtatgcaccacgatatcgtgcggcttttggatgagtacaacctggtgcggtccccacagctgcatggcactgccctgggtggcacacccactctgtctcccacactctgctcgccaaatggctaccctggcaatctcaagtctgccacacagggcaagaaggcccgcaagccaagcaccaaagggctggcttgtggtagcaaggaagctaaggacctcaaggcacggaggaagagttcccaggatggcaagggctggctgttggacagctcgtcgagcatgctgtcgcctgtggactccctcgagtcaccccatggctacttgtcagatgtggcctcgcaccccctcctcccctccccattccagcagtctccatccatgcctctcagccacctgcctggtatgcctgacacccacctgggcatcagccacttgaatgtggcagccaagcctgagatggcagcactggctggaggtagccggttggcctttgagcaccccccgccacgcctctcccacctgcctgtagcctccagtgcctgcacagtgctgagtaccaatggcaccggggctatgaatttcaccgtgggtgcaccggcaagcttgaatggccagtgtgagtggcttccccggctccagaatggcatggtgcccagccagtacaacccactacggccgggtgtgacgccgggcacactgagcacacaggcagctgggctccagcatagcatgatggggccactacacagcagcctctccaccaataccttgtccccgattatttaccagggcctgcccaacacacggctggcaacacagcctcacctggtgcagacccagcaggtgcagccacagaacttaccactccagccacagaacttacagccaccatcacagccacacctcagtgtgagctcggcagccaatgggcacctggggcggagcttcttgagtggggagcccagtcaggcagatgtacaaccgctgggccccagcagtctgcctgtgcacaccattctgccccaggaaagccaggccctaccaacatcactgccatcctccatggtcccacccatgaccactacccagttcctgacccctccatcacagcacagttactcctcctcccctgtggacaacacccccagccaccagctgcaggtgccagagcccactttcctcaccccatcccctgagtcccctgaccagtggtccagctcctccccgcattccaacatctctgattggtccgagggcatctccagcccgcccaccaccatgccgtcccagatcacccacattccagaggcatttaaataa

SEQ ID NO: 58 - DNA, 27740 bp, Homo sapiens
  misc_feature (5028)..(9933): "n" at positions 5028 through 9933 can be any base.
  misc_feature (14548)..(14694): "n" at positions 14548 through 14694 can be any base.
  misc_feature (18584)..(18836): "n" at positions 18584 through 18836 can be any base.
caggccagggagataatgggggacagggaagataacgcagtccccacggctataaacaggaagctcggccatgggcttgtgcagaaaaaggccctcggctgtgcacgtggttcctacatagcctttgccagacaccctgcgtggccctggaggtctccaggccgtgccccgtgccccgacacgcaggatgtgctgggggcctgggcctgtcccctccatcgcagcccttgtttgttggcctcccgtgatgggcgtttgctgcctgtgacacggagccccaggattagtttcaggcctcggtctcaggccagggcctttcctcgtcacccagagatgagggggcttgcgtccggggtgggcccaggtccctgcagtgtcgtggagcccacccgactgaggccgcctctcctggtgcagtccttgttcctgggcacgcctggtggggtgaggcctaggctgtgccccgctgccaaccgggaatgaggggtggcttctgagcgtgacatttgtgcagcttgtcttcagcgtccccccatctgtgctccactcctccctgggtcagggtcctggcacagccgggagcgctcaggggtctcggtgcacatttgcctcccggcgggaccagcagacggcactctgatggcggaaagaccagcaggcggtggccgatttgggagatccctctgggtgaggctcccggggtcacgtgtgtctccttcccgcaggtgccacgtgtgaggtggtgctggccccgtgtgcccccagcccctgcagaaacggcggggagtgcaggcaatccgaggactatgagagcttctcctgtgtctgccccacgggctggcaaggtgaggctggccagggcccggtgagggctgggatgggaggtcaggatgtctgcgggacacaggcagctcccaggcaggctagatgagtctttgaagaggagccggtgggtgctgaggaggccctggtcggagaagttctggaatcaggaattgacctgggagcaccgttcccaactccagttcctgtgaccttcttaggccaaaattaggggagaggggatggtcctggggtcacggaagcccactcctgggtcgggagaggcactgtaggtgggtgggccagcctgggaagggcctggagggccaggggccgctggtgaccaaccggcctcctcctgccccacagggcagacctgtgaggtcgacatcaacgagtgcgttctgagcccgtgccggcacggcgcatcctgccagaacacccacggcggctaccgctgccactgccaggccggctacagtgggcgcaactgcgagaccgacatcgacgactgccggcccagtgagtagccccgcggctctggcctcctccaggaagctctcaggcctcagttcccccgggcagggttggtgcgcatggtgctggccataagcacccagggaggccggagtgtggccggggagggttgggtcaggtgtgggggatgtgctgagggatggccagggtggttcaggagggccccagagccggcttgctcctccctgcacttcgcggaagagtcacgagagcccctcccacggctcttcactgagccgaggatggctcgggcccggcctgcactcccgcctggctcatcgggccccgctgcaggccagggctctcaggcctcccagccctgcttcacagaggttgaggttggcagaagccgggggtcttgctggcatcacctggcaggcagaggcaagaactgtctctcctcccctgctcggtctgtgaagcctgcaaagctgccccctgccctggagcttgaggacaggagcaggtggggagagagaccccaagcacaggagacgggtgtgacgcagcctgtgggtgctggggctccccaccagacacctttgtcacagggctgcttgccgcagcctcggcaacgaaaggctgggctgtccccagccatgcagccttcccggccccctcccgcaggtgtgggtttgtgcctgcccctcacactcacccttccgtcctctcccagacccgtgtcacaacgggggctcctgcacagacggcatcaacacggccttctgcgactgcctgcccggcttccggggcactttctgtgaggaggacatcaacgagtgtgccagtgacccctgccgcaacggggccaactgcacggactgcgtggacagctacacgtgcacctgccccgcaggcttcagcgggatccactgtgagaacaacacgcctgactgcacagagaggtgtgcggggctcgagtgaggccgtggaagggaacgggcggtgcgggccacacgcagtagctggcagcctggcacaccatgcaggcgtccgcctaggccggctgggcacttagcgctggctgcattgagtccagacattgttcattgtaccgacctgtccctcctgagagggccattgtgacctcctcctgtgtcccgcaccaggagcgccggtagtctgtcctgaagaactggtgcgcttccttctattagacaacgagaactctgtccgttcttgtttcctttttgccgtgtttgccaggaagctcatttggtaaacgtcagtctcgtccctggtttctgacgtaattacctcccgtgttaccaggacggtttctggtttctccctcatttactttaaccaccctatgcccacgcgtttggtaaaaccactctcgacctgacttataaagaaagcaggggagggaggtgtgacgtggtgtgagagccgggccccgggttcccactggcctccctgggtcagccaggctgccctgggcctgtcctggccatcaggcccctagggttgagcagaaggggaggtgctggcgaggcagaatctgctggagcggggacccaccaatgccctccgctcagcccccgcctgcccacccccttgcagctcctgcttcaacggtggcacctgcgtggacggcatcaactcgttcacctgcctgtgtccacccggcttcacgggcagctactgccagcacgatgtcaatgagtgcgactcacagccctgcctgcatggcggcacctgtcaggacggctgcggctcctacaggtgcacctgcccccagggctacactggccccaactgccaggtgagtgcgccggccacagaggtgcccgaaggaggggccctgggtgggtgcctgcctgcgggaggtgggaacggtcacccccaggtcccactgtgtcggctcggggtcacccccacacccccgggcagagggtttctggggatctgagcagccggtgaaggaacctgatgcggaagcagcaggcaccttcgtttcaatcccaggtttctggagccggggcgggagctcaggaattggggaattgaggaaaagtgttccttctagcaaaggccgagggtggtctggacctgctgagggccctgagggagacccagcccaggctgttcctggtgtgggggtggtggggagtccaggggcggcagtctccacttctgtagaatgggttgcagcctgggttggagtaggccccttggcggatgtgcgttctgagctaccggggaaatggccggggcgcgggcacccagctgaccccaatctgtccccagaaccttgtgcactggtgtgactcctcgccctgcaagaacggcggcaaatgctggcagacccacacccagtaccgctgcgagtgccccagcggctggaccggcctttactgcgacgtgcccagcgtgtcctgtgaggtggctgcgcagcgacaaggtaacctgctgtgcccacccggctcgggtcccagcccatcaaggtcctctgtgggcctgggcctcacctgtctaccaccccatcccccgcaggtgttgacgttgcccgcctgtgccagcatggagggctctgtgtggacgcgggcaacacgcaccactgccgctgccaggcgggctacacaggcagctactgtgaggacctggtggacgagtgctcacccagcccctgccagaacggggccacctgcacggactacctgggcggctactcctgcaaggtgggggtccctcctagggtaagggttgtggccggcacgagtgttgccacacaccaggccctggctgggagctggcccagtggagaaaactgaacctgataggcccatgcactgttcagtctcattaggggagggctggggtaatcagggtagactgcctggaagaggtggcctgtggaaagcctgaaggagggtacctatactgagaagtgggatggggttttcccttcccctagattgtgtctgggcttggccaacacctaccctgaggccctcacctctatcctatgggacggggtccacccacccccaacaggcagtgactccggtcaccgaggccccgccagggtctgttgggctgggtctctctccaggtctgacaggagcgaggggcccgtggcttcgctggacctgagggcagctcatgtggccctgtcagccctcacagtggggtgtgggagcactgcatcctggcgccggctgagccgaagggcccctcgttctgtcgcctgcacagtgcgtggccggctaccacggggtgaactgctctgaggagatcgacgagtgcctctcccacccctgccagaacgggggcacctgcctcgacctccccaacacctacaagtgctcctgcccacggggcactcagggtaagggccgctgcacggagggctggtgttggccatccatggccagggcaggggcagggcaggcaccccgggaccggccagaggcatccaggaaccagccagaaactcccgttttcctgtgtgaggccaaggccgactcacagctgcccagggaaagggcccagagcgggggtcccagtgggaagggcgtctccacggcacccttgacacctgcctctcccgagtgtccgtgcagccccagacctgagcgcttgtcttccgggacggacacgcggcacggcagggccggggtgtggcgggcttgggccactgacgaaacctggccccgcaggtgnnnnnnnnnnnnnnnnnnnnnnnnnnnnnnnnnnnnnnnnnnnnnnnnnnnnnnnnnnnnnnnnnnnnnnnnnnnnnnnnnnnnnnnnnnnnnnnnnnnnnnnnnnnnnnnnnnnnnnnnnnnnnnnnnnnnnnnnnnnnnnnnnnnnnnnnnnnnnnnnnnnnnnnnnnnnnnnnnnnnnnnnnnnnnnnnnnnnnnnnnnnnnnnnnnnnnnnnnnnnnnnnnnnnnnnnnnnnnnnnnnnnnnnnnnnnnnnnnnnnnnnnnnnnnnnnnnnnnnnnnnnnnnnnnnnnnnnnnnnnnnnnnnnnnnnnnnnnnnnnnnnnnnnnnnnnnnnnnnnnnnnnnnnnnnnnnnnnnnnnnnnnnnnnnnnnnnnnnnnnnnnnnnnnnnnnnnnnnnnnnnnnnnnnnnnnnnnnnnnnnnnnnnnnnnnnnnnnnnnnnnnnnnnnnnnnnnnnnnnnnnnnnnnnnnnnnnnnnnnnnnnnnnnnnnnnnnnnnnnnnnnnnnnnnnnnnnnnnnnnnnnnnnnnnnnnnnnnnnnnnnnnnnnnnnnnnnnnnnnnnnnnnnnnnnnnnnnnnnnnnnnnnnnnnnnnnnnnnnnnnnnnnnnnnnnnnnnnnnnnnnnnnnnnnnnnnnnnnnnnnnnnnnnnnnnnnnnnnnnnnnnnnnnnnnnnnnnnnnnnnnnnnnnnnnnnnnnnnnnnnnnnnnnnnnnnnnnnnnnnnnnnnnnnnnnnnnnnnnnnnnnnnnnnnnnnnnnnnnnnnnnnnnnnnnnnnnnnnnnnnnnnnnnnnnnnnnnnnnnnnnnnnnnnnnnnnnnnnnnnnnnnnnnnnnnnnnnnnnnnnnnnnnnnnnnnnnnnnnnnnnnnnnnnnnnnnnnnnnnnnnnnnnnnnnnnnnnnnnnnnnnnnnnnnnnnnnnnnnnnnnnnnnnnnnnnnnnnnnnnnnnnnnnnnnnnnnnnnnnnnnnnnnnnnnnnnnnnnnnnnnnnnnnnnnnnnnnnnnnnnnnnnnnnnnnnnnnnnnnnnnnnnnnnnnnnnnnnnnnnnnnnnnnnnnnnnnnnnnnnnnnnnnnnnnnnnnnnnnnnnnnnnnnnnnnnnnnnnnnnnnnnnnnnnnnnnnnnnnnnnnnnnnnnnnnnnnnnnnnnnnnnnnnnnnnnnnnnnnnnnnnnnnnnnnnnnnnnnnnnnnnnnnnnnnnnnnnnnnnnnnnnnnnnnnnnnnnnnnnnnnnnnnnnnnnnnnnnnnnnnnnnnnnnnnnnnnnnnnnnnnnnnnnnnnnnnnnnnnnnnnnnnnnnnnnnnnnnnnnnnnnnnnnnnnnnnnnnnnnnnnnnnnnnnnnnnnnnnnnnnnnnnnnnnnnnnnnnnnnnnnnnnnnnnnnnnnnnnnnnnnnnnnnnnnnnnnnnnnnnnnnnnnnnnnnnnnnnnnnnnnnnnnnnnnnnnnnnnnnnnnnnnnnnnnnnnnnnnnnnnnnnnnnnnnnnnnnnnnnnnnnnnnnnnnnnnnnnnnnnnnnnnnnnnnnnnnnnnnnnnnnnnnnnnnnnnnnnnnnnnnnnnnnnnnnnnnnnnnnnnnnnnnnnnnnnnnnnnnnnnnnnnnnnnnnnnnnnnnnnnnnnnnnnnnnnnnnnnnnnnnnnnnnnnnnnnnnnnnnnnnnnnnnnnnnnnnnnnnnnnnnnnnnnnnnnnnnnnnnnnnnnnnnnnnnnnnnnnnnnnnnnnnnnnnnnnnnnnnnnnnnnnnnnnnnnnnnnnnnnnnnnnnnnnnnnnnnnnnnnnnnnnnnnnnnnnnnnnnnnnnnnnnnnnnnnnnnnnnnnnnnnnnnnnnnnnnnnnnnnnnnnnnnnnnnnnnnnnnnnnnnnnnnnnnnnnnnnnnnnnnnnnnnnnnnnnnnnnnnnnnnnnnnnnnnnnnnnnnnnnnnnnnnnnnnnnnnnnnnnnnnnnnnnnnnnnnnnnnnnnnnnnnnnnnnnnnnnnnnnnnnnnnnnnnnnnnnnnnnnnnnnnnnnnnnnnnnnnnnnnnnnnnnnnnnnnnnnnnnnnnnnnnnnnnnnnnnnnnnnnnnnnnnnnnnnnnnnnnnnnnnnnnnnnnnnnnnnnnnnnnnnnnnnnnnnnnnnnnnnnnnnnnnnnnnnnnnnnnnnnnnnnnnnnnnnnnnnnnnnnnnnnnnnnnnnnnnnnnnnnnnnnnnnnnnnnnnnnnnnnnnnnnnnnnnnnnnnnnnnnnnnnnnnnnnnnnnnnnnnnnnnnnnnnnnnnnnnnnnnnnnnnnnnnnnnnnnnnnnnnnnnnnnnnnnnnnnnnnnnnnnnnnnnnnnnnnnnnnnnnnnnnnnnnnnnnnnnnnnnnnnnnnnnnnnnnnnnnnnnnnnnnnnnnnnnnnnnnnnnnnnnnnnnnnnnnnnnnnnnnnnnnnnnnnnnnnnnnnnnnnnnnnnnnnnnnnnnnnnnnnnnnnnnnnnnnnnnnnnnnnnnnnnnnnnnnnnnnnnnnnnnnnnnnnnnnnnnnnnnnnnnnnnnnnnnnnnnnnnnnnnnnnnnnnnnnnnnnnnnnnnnnnnnnnnnnnnnnnnnnnnnnnnnnnnnnnnnnnnnnnnnnnnnnnnnnnnnnnnnnnnnnnnnnnnnnnnnnnnnnnnnnnnnnnnnnnnnnnnnnnnnnnnnnnnnnnnnnnnnnnnnnnnnnnnnnnnnnnnnnnnnnnnnnnnnnnnnnnnnnnnnnnnnnnnnnnnnnnnnnnnnnnnnnnnnnnnnnnnnnnnnnnnnnnnnnnnnnnnnnnnnnnnnnnnnnnnnnnnnnnnnnnnnnnnnnnnnnnnnnnnnnnnnnnnnnnnnnnnnnnnnnnnnnnnnnnnnnnnnnnnnnnnnnnnnnnnnnnnnnnnnnnnnnnnnnnnnnnnnnnnnnnnnnnnnnnnnnnnnnnnnnnnnnnnnnnnnnnnnnnnnnnnnnnnnnnnnnnnnnnnnnnnnnnnnnnnnnnnnnnnnnnnnnnnnnnnnnnnnnnnnnnnnnnnnnnnnnnnnnnnnnnnnnnnnnnnnnnnnnnnnnnnnnnnnnnnnnnnnnnnnnnnnnnnnnnnnnnnnnnnnnnnnnnnnnnnnnnnnnnnnnnnnnnnnnnnnnnnnnnnnnnnnnnnnnnnnnnnnnnnnnnnnnnnnnnnnnnnnnnnnnnnnnnnnnnnnnnnnnnnnnnnnnnnnnnnnnnnnnnnnnnnnnnnnnnnnnnnnnnnnnnnnnnnnnnnnnnnnnnnnnnnnnnnnnnnnnnnnnnnnnnnnnnnnnnnnnnnnnnnnnnnnnnnnnnnnnnnnnnnnnnnnnnnnnnnnnnnnnnnnnnnnnnnnnnnnnnnnnnnnnnnnnnnnnnnnnnnnnnnnnnnnnnnnnnnnnnnnnnnnnnnnnnnnnnnnnnnnnnnnnnnnnnnnnnnnnnnnnnnnnnnnnnnnnnnnnnnnnnnnnnnnnnnnnnnnnnnnnnnnnnnnnnnnnnnnnnnnnnnnnnnnnnnnnnnnnnnnnnnnnnnnnnnnnnnnnnnnnnnnnnnnnnnnnnnnnnnnnnnnnnnnnnnnnnnnnnnnnnnnnnnnnnnnnnnnnnnnnnnnnnnnnnnnnnnnnnnnnnnnnnnnnnnnnnnnnnnnnnnnnnnnnnnnnnnnnnnnnnnnnnnnnnnnnnnnnnnnnnnnnnnnnnnnnnnnnnnnnnnnnnnnnnnnnnnnnnnnnnnnnnnnnnnnnnnnnnnnnnnnnnnnnnnnnnnnnnnnnnnnnnnnnnnnnnnnnnnnnnnnnnnnnnnnnnnnnnnnnnnnnnnnnnnnnnnnnnnnnnnnnnnnnnnnnnnnnnnnnnnnnnnnnnnnnnnnnnnnnnnnnnnnnnnnnnnnnnnnnnnnnnnnnnnnnnnnnnnnnnnnnnnnnnnnnnnnnnnnnnnnnnnnnnnnnnnnnnnnnnnnnnnnnnnnnnnnnnnnnnnnnnnnnnnnnnnnnnnnnnnnnnnnnnnnnnnnnnnnnnnnnnnnnnnnnnnnnnnnnnnnnnnnnnnnnnnnnnnnnnnnnnnnnnnnnnnnnnnnnnnnnnnnnnnnnnnnnnnnnnnnnnnnnnnnnnnnnnnnnnnnnnnnnnnnnnnnnnnnnnnnnnnnnnnnnnnnnnnnnnnnnnnnnnnnnnnnnnnnnnnnnnnnnnnnnnnnnnnnnnnnnnnnnnnnnnnnnnnnnnnnnnnnnnnnnnnnnnnnnnnnnnnnnnnnnnnnnnnnnnnnnnnnnnnnnnnnnnnnnnnnnnnnnnnnnnnnnnnnnnnnnnnnnnnnnnnnnnnnnnnnnnnnnnnnnnnnnnnnnnnnnnnnnnnnnnnnnnnnnnnnnnnnnnnnnnnnnnnnnnnnnnnnnnnnnnnnnnnnnnnnnnnnnnnnnnnnnnnnnnnnnnnnnnnnnnnnnnnnnnnnnnnnnnnnnnnnnnnnnnnnnnnnnnnnnnnnnnnnnnnnnnnnnnnnnnnnnnnnnnnnnnnnnnnnnnnnnnnnnnnnnnnnnnnnnnnnnnnnnnnnnnnnnnnnnnnnnnnnnnnnnnnnnnnnnnnnnnnnnnnnnnnnnnnnnnnnnnnnnnnnnnnnnnnnnnnnnnnnnnnnnnnnnnnnnnnnnnnnnnnnnnnnnnnnnnnnnnnnnnnnnnnnnnnnnnnnnnnnnnnnnnnnnnnnnnnnnnnnnnnnnnnnnnnnnnnnnnnnnnnnnnnnnnnnnnnnnnnnnnnnnnnnnnnnnnnnnnnnnnnnnnnnnnnnnnnnnnnnnnnnnnnnnnnnnnnnnnnnnnnnnnnnnnnnnnnnnnnnnnnnnnnnnnnnnnnnnnnnnnnnnnnnnnnnnnnnnnnnnnnnnnnnnnnnnnnnnnnnnnnnnnnnnnnnnnnnnnnnnnnnnnnnnnnnnnnnnnnnnnnnnnnnnnnnnnnnnnnnnnnnnnnnnnnnnnnnnnnnnnnnnnnnnnnnnnnnnnnnnnnnnncccgggccaggggtctctgggggcttcctagggagctcgctcagcctcacttctcgacccctcaccccccaggcccctgaagaacgcttcagacggtgccctcatggacgacaaccagaatgagtggggggacgaggacctggagaccaagaagttccgggtgagtcgcgaggctcccgggctcctgggctcccgggcacctgctgccgggctgccctgacaggctctgctcactccctctatgtagttcgaggagcccgtggttctgcctgacctggacgaccagacagaccaccggcagtggactcagcagcacctggatgccgctgacctgcgcatgtctgccatggcccccacaccgccccagggtgaggttgacgccgactgcatggacgtcaatgtccgcgggcctggtaagggtgccagcagccagggcttccctagccccgtggcccacctgcctctctcccctaagccccgaggctggggtacagttgattctctggaaacttagaattgggggtgagagctttcatccttggggtgtttcccattcagagtagacgtgggggggtcctggagtcctcctgttcttccaccaaccccttcctggggtgataccgcagggccactctgtccctgtaaattactcttttctgaaaccttcttgagacatggaaagcgttgattttctttttcttttttttttttcttttttttttgtttttgagatggagtctcgctccgtcacccaggctggagtgcagtggcacgatctcggctccctgcaacctccacctctcgggttcaagcaattctcctgcctcagcctccccagtagctgggactacaggcgcctgccaccacacctggctaatttttgtatttttagcagcgatggggtttcaccatgttggccaggctggtctcgaactcctgacctcaggtgatccgcccacctcggcctcccccagtgctaggatgacagcgtgagcctccgcatcctgctgaagcattaattttctaactgcatgcttctggggtcctctttttcctgggtggattttgggtgccaggtcttgggcaggtcaggaagcagttgcccgccaggagtttaagctggattcggctctgtccactgagcagcccaggcggacttcagctgccccttggtggctgtgtgcacggggccaccaagtgctgggtggtgcatccacaccgtggccccttgagcttggggctgctgcccccctccccctgggctgcagctggggaccggccctccagactgagcacccgtctctgcctctgcagatggcttcaccccgctcatgatcgcctcctgcagcgggggcggcctggagacgggcaacagcgaggaagaggaggacgcgccggccgtcatctccgacttcatctaccagggcgccagcctgcacaaccagacagaccgcacgggcgagaccgccttgcacctggccgcccgctactcacgctctgatgccgccaagcgcctgctggaggccagcgcagatgccaacatccaggacaacatgggccgcaccccgctgcatgcggctgtgtctgccgacgcacaaggtgtcttccaggtaggcagtggctgcctgtgtgcccacctgccctcctcagggccgcctggtggtctggggcagtggccaggcttacgtggccctgggagcctgaccccgagcacagctgagtccgggacaactggtgcctccacctgggaccttcgcagtcagcgaggtgcgagggggagggcgtcgggcccatctgtgttctccagggaagtcaggcagaggcgggtctggcaggaggcctgggggatctgctgagtgaggcagcacctccccacccccagcaaaacaggctccatcagggttgtgggccttgctcaaggtccaggttccactgctgcagcccctcgcagccccgcccctccctcaaccttggctgccggcgtagcctgtggcagtgagaagcagggtttagaggctgccgctcggtgcctgcagacctagggctcagcttgccggtgagctcgtggcaagaatggatttagggatttggatgcctgggtctccagggagtgtccctggcaggggctgcctttgcagtcacccctgctgcgagtccccaggctccaggcggccctggagcaagcaggttcagatgggcacagcccggggagttaccacagagcttctcatttcctgatttcttagctcaggtgacacattgtcatcttgcagaaataaatgtaggtgagcagaaagagcgtggaagggagccccgtgcgggtttggtgtgtgcctctctcagctgccttctttgcacagatgtggaagttcccaggtgctttgcaggaatcaggccaagttgccttttgcacccgccagtgagcaggggccattcctcctgccagatgccaagacccggctgcattacaagggctgcccaccccctctctgggcagagccggacactagctcggcggttctgagacggctgtagggccgtgagcccggcttcctgagtgccagctgtaaccgccgttgggggcagggacttgacctctctgttttgtaggtggtcatggcagctaggaccacagtgaggattaaatgaggccacacgtggtcacgatggatcccactgtcaccaaggggcctgtctgtgggcagcacagcccctgcccccatccgggcccctcctcaggggcagccccatggcgtttcgtcttgcccggccgtgccgatctcaggagggtctcgtctgtgtccggaagacagtggggcttcccgtccaggcgttcgttctgggcaggaggcatcggtgtacgtctgcccagcacccgcctgagcctctccctgttgcccagatcctgatccggaaccgagccacagacctggatgcccgcatgcatgatggcacgacgccactgatcctggctgcccgcctggccgtggagggcatgctggaggacctcatcaactcacacgccgacgtcaacgccgtagatgacctgggtgagcccacgggggcacggctgctctgtcgtggggcgggaccgccacagggacgggtgggactgggttgcctccagctggtctccaacctaccccatctgcttctttcacgcaggcaagtccgccctgcactgggccgccgccgtgaacaatgtggatgccgcagttgtgctcctgaagaacggggctaacaaagatatgcagaacaacagggtgagcgcgaggctgggatgccaggggagacgtgagggctgaatccacagagaagtgagggccaaacccacggggcgcagggacacaagggcctgacccacagggtctcgagggtcgctgggcccgcatgtgggccccacccgcatgatgcgggcacctcgttagtgctcctgccctccttcagcccctgtttatggagcccttccaagtgcaggtccagctgtcaggacacggcggctcgcccctcagacccagccctaccctcctgggcggcagtcatggcagggcacacagcctggcgtggggaacgctgctgctgccactgctgtgtcaccgtcacctggacctcaccttctgtccccagctgtcaccaggcgggggtggggatgggaatgtggtgacgcaggtggtgcagattgagccagaacacgcgtggcggcagctccctgcggggcggggcctcttggtgtgttcaccaaggccaaggacctcaaggctcagaggaagaagtctcaggactatatccaaggggagccacccccagccctcatcctggccctgcagctcctggccctgcagctgctgttggtttcccctgggtgctcagggcacaggtgcagacacccccacctccctgccgccagaacccccacccccgcccccaactcctgctgcccccttggcatgtcaggctcaggcgtctctccctcctgggtgagggcacacagcgggcctgggcaccggggcatgttggcccaggcgctccccagtccgtggcagcatggccccacagagactgggccccagagggcatcaaggcctgggaagccccttcccactcccacacagcagcctcacccagacctgtgacgtgtccaccgcacagaggagaccccaggaaggagcttggtggccaccagggtggcttgatggccgtccagatgacgagctccctccctggtgccctcgccggtgcctctgaaccgctccaggaatttccttttgtgccttattgggggcagggaagagggcctgcagttggttagattttcagtggggtctgtgacccccccatagaggtggagccccgctgatctagggtagaggactgcacagatcccctctctgggtgggtttcagaagatgtatcaaagccttaacatttaacaagagtcaggctaggtggttgcaggacgctggggtggggtcctgaggagcagcctgcctgcccccaccccgcggaggaggttgtactgctgcttcctctggtgatggaaccttggggagggtccccacgcctggcctggcccccctcaccggcccccgccctcatcccccaggaggagacaccnnnnnnnnnnnnnnnnnnnnnnnnnnnnnnnnnnnnnnnnnnnnnnnnnnnnnnnnnnnnnnnnnnnnnnnnnnnnnnnnnnnnnnnnnnnnnnnnnnnnnnnnnnnnnnnnnnnnnnnnnnnnnnnnnnnnnnnnnnnnnnnnnnnttgccaaccgggacatcacggatcatatggaccgcctgccgcgcgacatcgcacaggagcgcatgcatcacgacatcgtgaggctgctggacgagtacaacctggtgcgcagcccgcagctgcacggagccccgctggggggcacgcccaccctgtcgcccccgctctgctcgcccaacggctacctgggcagcctcaagcccggcgtgcagggcaagaaggtccgcaagcccagcagcaaaggcctggcctgtggaagcaaggaggccaaggacctcaaggcacggaggaagaagtcccaggatggcaagggctgcctgctggacagctccggcatgctctcgcccgtggactccctggagtcaccccatggctacctgtcagacgtggcctcgccgccactgctgccctccccgttccagcagtctccgtccgtgcccctcaaccacctgcctgggatgcccgacacccacctgggcatcgggcacctgaacgtggcggccaagcccgagatggcggcgctgggtgggggcggccggctggcctttgagactggcccacctcgtctctcccacctgcctgtggcctctggcaccagcaccgtcctgggctccagcagcggaggggccctgaatttcactgtgggcgggtccaccagtttgaatggtcaatgcgagtggctgtcccggctgcagagcggcatggtgccgaaccaatacaaccctctgcgggggagtgtggcaccaggccccctgagcacacaggccccctccctgcagcatggcatggtaggcccgctgcacagtagccttgctgccagcgccctgtcccagatgatgagctaccagggcctgcccagcacccggctggccacccagcctcacctggtgcagacccagcaggtgcagccacaaaacttacagatgcagcagcagaacctgcagccagcaaacatccagcagcagcaaagcctgcagccgccaccaccaccaccacagccgcaccttggcgtgagctcagcagccagcggccacctgggccggagcttcctgagtggagagccgagccaggcagacgtgcagccactgggccccagcagcctggcggtgcacactattctgccccaggagagccccgccctgcccacgtcgctgccatcctcgctggtcccacccgtgaccgcagcccagttcctgacgcccccctcgcagcacagctactcctcgcctgtggacaacacccccagccaccagctacaggtgcctgagcaccccttcctcaccccgtcccctgagtcccctgaccagtggtccagctcgtccccgcattccaacgtctccgactggtccgagggcgtctccagccctcccaccagcatgcagtcccagatcgcccgcattccggaggccttcaagtaaacggcgcgccccacgagaccccggcttcctttcccaagccttcgggcgtctgtgtgcgctctgtggatgccagggccgaccagaggagcctttttaaaacacatgtttttatacaaaataagaacaaggattttaattttttttagtatttatttatgtacttttattttacacagaaacactgcctttttatttatatgtactgttttatctggccccaggtagaaacttttatctattctgagaaaacaagcaagttctgagagccagggttttcctacgtaggatgaaaagattcttctgtgtttataaaatataaacaaagattcatgatttataaatgccatttatttattgattccttttttcaaaatccaaaaagaaatgatgttggagaagggaagttgaacgagcatagtccaaaaagctcctggggcgtccaggccgcgccctttccccgacgcccacccaaccccaagccagcccggccgctccaccagcatcacctgcctgttaggagaagctgcatccagaggcaaacggaggcaaagctggctcaccttccgcacgcggattaatttgcatctgaaataggaaacaagtgaaagcatatgggttagatgttgccatgtgttttagatggtttcttgcaagcatgcttgtgaaaatgtgttctcggagtgtgtatgccaagagtgcacccatggtaccaatcatgaatctttgtttcaggttcagtattatgtagttgttcgttggttatacaagttcttggtccctccagaaccaccccggccccctgcccgttcttgaaatgtaggcatcatgcatgtcaaacatgagatgtgtggactgtggcacttgcctgggtcacacacggaggcatcctacccttttctggggaaagacactgcctgggctgaccccggtggcggccccagcacctcagcctgcacagtgtcccccaggttccgaagaagatgctccagcaacacagcctgggccccagctcgcgggacccgaccccccgtgggctcccgtgttttgtaggagacttgccagagccgggcacattgagctgtgcaacgccgtgggctgcgtcctttggtcctgtccccgcagccctggcagggggcatgcggtcgggcaggggctggagggaggcgggggctgcccttgggccacccctcctagtttgggaggagcagatttttgcaataccaagtatagcctatggcagaaaaaatgtctgtaaatatgtttttaaaggtggattttgtttaaaaaatcttaatgaatgagtctgttgtgtgtcatgccagtgagggacgtcagactcggctcagctcggggagccttagccgcccatgcactggggacgctccgctgccgtgccgcctgcactcctcagggcagcctcccccggctctacgggggccgcgtggtgccatccccagggggcatgaccagatgcgtcccaagatgttgatttttactgtgttttataaaatagagtgtagtttacagaaaaagactttaaaagtgatctacatgaggaactgtagatgatgtatttttttcatcttttttgttaactgatttgcaataaaaatgatactgatggtgatctggcttccactcccctctgctctggcctttggctccctttctgggagggaggcagggctgctatgctctgagggagccaggagtcgagggccccttctgctgggagagtgacggtgaggctgcctagtcctggcccacgggggtgtggggaccacgctgcctccagggactccatggtgtctgcagcctgcctggtccaggccctttgtagggagatggacacacagcagcaagggggttgcagccctatgggaggtggggctcgtgcctggggtgacacggctcccaggacaccatgcgtgagtctggccctcctggcagctcggggctcttctcctctcagcctcggagggatgaaggtcccacccagccatcctggggacagcccctcagggagctctgcagcaggcagggggctgcatagggagggccttgaggcagtggcatgacccctctacgggctggagaccacagggaggactctggcccctataggagggcaaagggagctgtcgaagcctatgagcagggcagcatgggtcgtggcagagtctggaaagttgtgtgatcctaaggaactggctgagcgaggcagaggcggcctggtcctggggccctgcccctgaatagagctgccagcctcacacaagggtgggccccttctctccccactgcctgggcctctgcccagccccagaccttcagggcaggccagtggcttcaaaccagagcggtggggagtctgagatccctctttggattgcaaagcactgcctgccctgggcccagtctctccaaggagggatgtgagcccgaggcctctactatggctgggggctgcgnnnnnnnnnnnnnnnnnnnnnnnnnnnnnnnnnnnnnnnnnnnnnnnnnnnnnnnnnnnnnnnnnnnnnnnnnnnnnnnnnnnnnnnnnnnnnnnnnnnnnnnnnnnnnnnnnnnnnnnnnnnnnnnnnnnnnnnnnnnnnnnnnnnnnnnnnnnnnnnnnnnnnnnnnnnnnnnnnnnnnnnnnnnnnnnnnnnnnnnnnnnnnnnnnnnnnnnnnnnnnnnnnnnnnnnnnnnnnnnnnnnnnnnnnnnnnccggcatcactcagtacagccacagacagcctgagcgtccactgccaacgacgggtcagcaaaaaccgtctgctgtgacggtgaaccttagtgtcagcttggccgggccatttcgccaaacggagtgtgtctctgaggtgttctggatgaggttcgcatttgcatccacagcctgggtaaggcagtccgccctccccagtgtgggtgggccccgtgcggtccgctgaggcccggggagaacaataggccgagtgccaggggtcctcccacccaaccgcttgcactggacattggtcttttcctgccttcagacttggactgaaaacgtgggctcttcctgggcctggagcccaccggccttcggactcgcaacgccatcaggcctcctgcctgcaactgcagaccctgggaactgcaggcctcgaggtcgtgtggccaattccctgcaataacctctccagtggcacgtcttatgggctccgcttgccggaagaaccctgacgaatgcgcacgagggaatatgattccaccgtagaaaaggaggcgctgacacccaccatgcggacaagccttggaagcacggtgctcagtgaagggtgccggccgcaaagggccgcaggtgcagtgactccatttctatggggtgcctgtggtcaccgaacccatggagacagaaagtagattgatggttcccagagccggggggaggaggaaaggggagtggctgctaaacggcccggggtttttttttgttttgttttgtttttatactttaagttttagtttattgtggcactgttcacaatagcaaagacttggaaccaacccaaatgtccaacaatgatagactagattaagaaaatgtggcacatatataccatggaatactatgcagccataaaaaatgatgagttcatgtcctttgtagggacgtggatgaagacggcccggggttttactttggagtgacgcaaatgttctgggcccagggagaggtggtgcgtgcacagcccttcgagtgcactaaatgccaataacgcggacacttttttttttttttttttgagacggagtctcgctctgtcacccaggctggaatgtggtggcgtgatcttggctcactgcaacctccgcctctgtgttcaagtgattctcctgcctcagcctccaaagtaactgggattacaggcccctaccaccacacccggctgatttttttgtatttttagtagagattgggtttcaccatgttggccaggctggtttcaaactcctgatctcaagtgatccacccgcctcggcctcttaaagtgctgaggttacaggcgtgagccactgcacctggcctaactcgtacactttaaagtggttaattttaggttctgtgagtctcacctcaatatgttattttttttttttaattaaaaaaagtttttgagacagggtcttgctctgtcacccaggctggagtgcagtggtgccatgatagcttattgcagcctcaacctcctgggcccaggtgatcctcccaccttggtctctctagcagctgggattacaggtgcacaccacctcacccacccaatttttttgttattttttgcagagatggggtctcactttgttgcccaggttggtctcgaactcctgagctcatgcagtcctctcctcaccttggcctcccagagtgctgggattacaggtgtgggccattgcgcctggccacatatgcaactttaaatatttcagtagccacattaaaaaggtaaaaagaaacaggcaaagtgtatattaatactacagcttagttaatccaatatatcaaaaatattattttaacacaacataaaaagtgaatgagtttttttttgttgttttttgttttttgagacagagtctccctctgtcacccaggctggagtgcagtggtgcgatctcagctcactgcaacttccgcctcccgggttcaagcgattctcctgcctcagcctcccgagtagctgggattacaggcacctgccaccacgcccagctaatttttgtatttttagtagagagggggtttcaccatgttggccaggctggtcttgatctcttgacctcgtgatcggcccacctcggcctcccaaagtgctgggattataggcgtaagccaccacgcccggccgtgaatgagatgttttatattctttttgtttgtttgtttttggtactgtgtctttgaaacccaggatgtacagtacactcacagcaccctagattgggcctggccacactttaaaaggtgttcagtatctccaggaggctcacgtccagattcggactcttcagcaggatgccaagggggctccagacagttccacccagcgcaggaaaacaccaagtgtatcttcagcctggtgactcactccacgccgctgccggcgtgaaccccgagtgtggcgctgcgtccctctggatagagcaaaggagggtcccaagagcccggaggcaccaactcatcagggcccacaaatcaggcccccggcaggcagggctgcctccatccaagagggaagcacggtgccgtagcccccgggctgctccagggatcgacaggcctgtgctgccttcatcccaaaagtctcacttgcaaagggtgtccgtggggctcaactgcgtgctcagcggtggactgatttcgttctgtgtggctccttatctcatcgtggacccaaatccacgaaccacacatgaggagctctgctggagggggcagcactgggcagaggcagacaagggggagcgtcacgcggctgtttcccgtggtgagcatccaccagcagcggttcctggtgggacaccgacgtattcgtctgcaaaagtaaaagtgtttcaaaacaaaaccgggtccagcttggtcccggtgcgttgaaagtgctggcgttggccaggcgtggtggctcacgcctgtaatcccagcactttgggaggctgaggcgggtggatcacaaggtcaggagattgagaccatcctggctaacacggtgaaaccccgtctctactaaaaaatacaaaaaattagccgggcgtggtggcaggcgcctgtagtcctagctacttgggaggctgaggcaggagaatggcgtgaacctgggaggcggagcttgcagtgagcagagatcatgcctctgcactccagcctgggcgacagagcaagacactctcacaaaaaaaaaaaaaaaaaaaaagtgctggcgttagtggaggtctctcagagggggcgttgcagggcctcccacgttactcaggctttgcagacgaagacgcagggtccgtgagtgagcgagctttgggaaaggctgttcttcaatctgcatcttgaaggtggctgggtggcgcctcagtcgcctgccccgacgtgactcccgatctggctgcttcgtgtctttgctttccacctggcggctgctgtcctggctgttgctgtacctcagtgtcctcgtgggtcaagtggggacctgggtgctggccctgggcctgcgatggtgagctgctggtgcacgctgggcatggggtgagggctcagaaagggaacagctcttgttatcgttaggaggttttcaatcgcattctttgttctccacctgcatgccgtgttggcacagttaagcctggcggccccttcagcaggtgtcctaaccgtctacattttaagatggacaagtctaggctcatggagattgcaggactgagctgcgaagctttattcatgcccaacacgacaggcgccaggtgcccagggcctcagaggtgggtttccgttgttcttcacacaaccttgaacttgtggcccatccctggaccttacagcacaggacacactctcagtgtttgttaggaatctataattttctgcggagtcacgcgtgatatttgctgtggcttttggtatatcttccactctatcgcacgggattttctggtgaaaatgtgccctgggtccacacaaacgtgcacattctaccacagcctttgtcgttctgtttggcatttttccatttaataaaatgaaccttagaaaagttataactacggccaggcgtggtggctcacacctgtcatcccagcacttcgggaggccgaggcgagaggatcacctgtggtcaggagttccacaccagcctggtcaactggtgaaacccccctctccactaaaaatacaaaaattagctgggcaccatggtgggcacctagaatctcagctacttgggggggctgaggcaggagaattgcttgaattcggaaggaggaggttgcagtgagctgagattgcaccactgcactccagcctgggggatacagtgagactcggtctcaaaaaaaaaaaagaaaagtgtataactttacttttttttctttttgtggagatggaatcttgctatgttgcccaggctggtctcaaacccctaggttcaagtgatcctcccactttggcctcccaaaatgctgagacgacagatgggagcaacctcacctggcaagcgtgcacctgttactttggccgactcagaggcggctctctgcctccccctggtggcactgctctgccagcgccccacaggtcctcccgagtgaccacagggcagaaatggccctcaccccacgcccagggccatcccccgcgacactgctattatcctgttttacacatgaggaagctggggctcaaagaggttaggcgacttagccaagttcgcccattcactgagccagggctatgtgattcccggtccgtgtcaaaccacgaggagtcacctgccctcagaggagcaggaaggcctgtagagttgatgccatccagcctggtgacttttcagacagggagacggctgctcagaggggagaagggggttgttgggccactttgccaggagtcaataccatggccagcctggcatcggatactttgccaggagttaatgccacgactggcctggcatcgaatactggagctcttcccagctccacccgggcccttttctcttccctatctacagtccccaggccaccaagtccatgtccaccacttaaatcatcactcaatgctcaggactgtctcctgcctgctgtgtgtgaaccccgtgctgtgctggggttgtgccctcggggactctcccgggttcttggggactctcctgggttcagcgcctctttctcctaggccacccaaggctgcctcctgggccctggctctccctagcccctagctcgaaccctaacctggagagcctttggggcccaaactggttgcatcgctcctggctgaaaagcctctggaagcttcctatacttccagacaccacctgcgggtctcttagcaagcctacagagtccacactagcctacgcccactggccgctcaccccgcagaagcctcatgtggactgttcacttcagccagaaatgctccttctcctcctgcctgtccccagcagacactgcatggtgccctctgtatgggcacctctgtggccagccagcatccatgttccccggaggcagagtctgggcttgtctgtctcacggccacagcccagctcctagcagtgcctggggtacagcagggactcagcagacatctgtgcatggtttggggatagaggactcgtgggcttaccaagaccctgcctcagctcaaggacagccagcagttcctcctgtggccctgggggcctgcggtcccaggttactgtgacatcgacatcagccttgagctttctgcttcattcctagtgctttttagcaccttacatggtaagtacttggctcaatgattccagaaaaatgttctctgagacctgctatgtgcccaacatgcttgaagatgctggagatgaggagcatgacgctcctgcagtaacgaggctgctggcaatgccgtcaatgtgccctgtgcctccggggaggcctggtgtggaggatacgcttgccaccctgtgaggtcaggtccaggaagtccttgcaggaggccgggaaagggcaaggctgtcaccttcttttacaggggaggaggcagaggcttggaaaggccaggtagcttgcccaaggctgaacacctgggtagtggctgagggtctctgacttctggaagcttgcagtacagctggacacacggtagttagcccaccattgctggagccatcttacctgtgctctgctagccaggtgggcgcccaaaaggagatgcctttgcctgtgctgggaggaggcgctgtgggacccattccccagcagccgagagcaagggcacatgtgccagggcggggatgcaccttcagcctcatgtcagccctgggaaggcctagaaagtggacagtgctgtctcgctgcacacccctggcgagcacaccgggcgagcactccaggttagggtggggctcagaggtgagtagaacacgggaagggggtggcagcgtggtgagcatgtttgcggaccctatgctgtgtgcttggcaggccttgtgcatggaagtgagtgggactgaagctccctccacactgcccaccatggccctgggggtctggccttcccctcacagaggtgacttcctctcctctatgagggtaagaagaggaagcctggcccaccctctggccagcctggtggcatgctgacagggaacccctgcaggggcctgatgaacaaacgccacagaacaaactctacggaccctgcctccagatctgcttcctctcccctgattccagcttcccagccctattccctcctcctccaggaagagctccgtgtcagtgctctccaccttggaggccttcatatgtttttttgcctggaccacccagctaaccgtctcacagagactgccccttcctctctccaggccaagcctccagcttcagcgtccaggactaagggtctgtgtcaggggctgaggacagtgtccggcagggagcaggcctgcccagtaaacctccacaagcacccagacatactcgccactgctattttacaccaggtaggaaagaggagcagaagctcacagtgaggggccgtcctgcgttcactgagactgctgctctgctgggggctccctggaggaccgccactggcccgccagttgtcagcaaagagccaggtccacccatcagcctctggcatttcaggcccctatcataggaggctataagcacaggctaggggtgctgagtgcctgccttctagaccaacactgtccagtggaaatgtaacaccagccccatgtggagttttacatttcccagcagctatgtcaaaaacaaaagaaacaggtgaaataaaattaaatagtattttgtttaatctgatacatccaagatattgtcattttaatatgcaataaaaaatgattgattcgatatttgcatccttcacaacctaccatgtagtttacactcagagcccagctcagtctcacagcaagcaccagcggcccccgtgctggacagcatggctaatgggaggagctgacccgtcggaggcaccaaggtcacgctgtgaccaaggctgtggtgacgcaaaggcagcgggtttcctggcacagcctggaggtgcaccagcctgtcctgtgtgctctgcataatgtggtacagcagtggtcacagagctttgcaccagatgctgattccagcccacctaggggggttcagggaagtggtgacacttgtgtccagcctccaggtgtgagcaggggcagagacttggagaatggagaaaccagcggatgctgcaggcaaaagcagcaaagccccaccaggaatagtgatggccaccaccggcgggacacctcccagcactgggtggaggcctctgctggctcgcagtcagtcacctgatgtccccattcgcccctgccatgcttgttgtcctggcaaccccatttcagccctgaaacgtttaggtgctcatcttgctctatcttagagatgaagacctgatgctcagagactaaggaagttgaaaaagggcacacagcgtctcaggggcaggctgggccttcaacggaagggtctatggcccagaggctggatgggctcgggtgtagggtgcaggaaccctccactccacatcaggctacaaactgctgagagctgtctccgtgcactcaggattagggagaagagggggaagaaagacagccgcgccccctgcaggtgatgtggtgattcacacccctaggagccaacagaagccgctgtctaacatccctgccctgaggtccagagaccttgcattttatgcctagggcagggttggtttctgcagctatggtctctcccatagcttagtgcccaccccggtgggaccacagggtttcggaggaccctagagggtcgagccctgggctcctggctcttgggttctttgaactcgcgagcggcaaaaggcgagccccacgcctgagaggcagcatccacctctgcatccccctctttggaaagggcaaacaatgacacctccttccgcggagggtgcagagcgcctcgaccactgggaagaagcagatgggggcagcggggctggggctgggccctaccacgtgctccctaactctgttcaaacaggtcaggaatctgactcctgaaaggcaaatgttagctgagcagattggccctggtgccacgtcagccggactgaagctctccctgcaccgcctgcggccctgctggcgtggcacggatatcaccccctccctcaccagccgccggcccagctggggacaagggtggctcccacccagggaggacctcagccgctgctgggagctcagcctcccgcgatgccatcgggcgggcacccccaccacggcgcctgccctctggaaggagcagcagaggaaggccgcggctcttccctgcccttgc

SEQ ID NO: 59 - DNA, 7615 bp, Homo sapiens
  misc_feature (2525)..(2533): "n" at positions 2525 through 2533 can be any base.
aggcccgcgatgctcccagcccggtgagacctgcctgaatggcgggaagtgtgaagcggccaatggcacggaggcctgcgtctgtggcggggccttcgtgggcccgcgatgccaggaccccaacccgtgcctcagcaccccctgcaagaacgccgggacatgccacgtggtggaccgcagaggcgtggcagactatgcctgcagctgtgccctgggcttctctgggcccctctgcctgacacccctggacaatgcctgcctcaccaacccctgccgcaacgggggcacctgcgacctgctcacgctgacggagtacaagtgccgctgcccgcccggctggtcagggaaatcgtgccagcaggctgacccgtgcgcctccaacccctgcgccaacggtggccagtgcctgcccttcgaggcctcctacatctgccactgcccacccagcttccatggccccacctgccggcaggatgtcaacgagtgtggccagaagcccgggctttgccgccacggaggcacctgccacaacgaggtcggctcctaccgctgcgtctgccgcgccacccacactggccccaactgcgagcggccctacgtgccctgcagcccctcgccctgccagaacgggggcacctgccgccccacgggcgacgtcacccacgagtgtgcctgcctgccaggcttcaccggccagaactgtgaggaaaatatcgacgattgtccaggaaacaactgcaagaacgggggtgcctgtgtggacggcgtgaacacctacaactgccgctgcccgccagagtggacaggtcagtactgtaccgaggatgtggacgagtgccagctgatgccaaatgcctgccagaacggcgggacctgccacaacacccacggtggctacaactgcgtgtgtgtcaacggctggactggtgaggactgcagcgagaacattgatgactgtgccagcgccgcctgcttccacggcgccacctgccatgaccgtgtggcctccttctactgcgagtgtccccatggccgcacaggtctgctgtgccacctcaacgacgcatgcatcagcaacccctgtaacgagggctccaactgcgacaccaaccctgtcaatggcaaggccatctgcacctgcccctcggggtacacgggcccggcctgcagccaggacgtggatgagtgctcgctgggtgccaacccctgcgagcatgcgggcaagtgcatcaacacgctgggctccttcgagtgccagtgtctgcagggctacacgggcccccgatgcgagatcgacgtcaacgagtgcgtctcgaacccgtgccagaacgacgccacctgcctggaccagattggggagttccagtgcatctgcatgcccggctacgagggtgtgcactgcgaggtcaacacagacgagtgtgccagcagcccctgcctgcacaatggccgctgcctggacaagatcaatgagttccagtgcgagtgccccacgggcttcactgggcatctgtgccagtacgatgtggacgagtgtgccagcaccccctgcaagaatggtgccaagtgcctggacggacccaacacttacacctgtgtgtgcacggaagggtacacggggacgcactgcgaggtggacatcgatgagtgcgaccccgacccctgccactacggctcctgcaaggacggcgtcgccaccttcacctgcctctgccgcccaggctacacgggccaccactgcgagaccaacatcaacgagtgctccagccagccctgccgccacgggggcacctgccaggaccgcgacaacgcctacctctgcttctgcctgaaggggaccacaggacccaactgcgagatcaacctggatgactgtgccagcagcccctgcgactcgggcacctgtctggacaagatcgatggctacgagtgtgcctgtgagccgggctacacaggggagcatgtgtaacatcaacatcgatgagtgtgcgggcaacccctgccacaacgggggcacctgcgaggacggcatcaatggcttcacctgccgctgccccgagggctaccacgaccccacctgcctgtctgaggtcaatgagtgcaacagcaacccctgcgtccacggggcctgccgggacagcctcaacgggtacaagtgcgactgtgaccctgggtggagtgggaccaactgtgacatcaacaacaatgagtgtgaatccaacccttgtgtcaacggcggcacctgcaaagacatgaccagtggctacgtgtgcacctgccgggagggcttcagcggtcccaactgccagaccaacatcaacgagtgtgcgtccaacccatgtctgaaccagggcacgtgtattgacgacgttgccgggtacaagtgcaactgcctgctgccctacacaggtgccacgtgtgaggtggtgctggccccgtgtgcccccagcccctgcagaaacggcggggagtgcaggcaatccgaggactatgagagcttctcctgtgtctgccccacgggctgnnnnnnnnnggcagacctgtgaggtcgacatcaacgagtgcgttctgagcccgtgccggcacggcgcatcctgccagaacacccacggcggctaccgctgccactgccaggccggctacagtgggcgcaactgcgagaccgacatcgacgactgccggcccagacccgtgtcacaacgggggctcctgcacagacggcatcaacacggccttctgcgactgcctgcccggcttccggggcactttctgtgaggaggacatcaacgagtgtgccagtgacccctgccgcaacggggccaactgcacggactgcgtggacagctacacgtgcacctgccccgcaggcttcagcgggatccactgtgagaacaacacgcctgactgcacagagagctcctgcttcaacggtggcacctgcgtggacggcatcaactcgttcacctgcctgtgtccacccggcttcacgggcagctactgccagcacgatgtcaatgagtgcgactcacagccctgcctgcatggcggcacctgtcaggacggctgcggctcctacaggtgcacctgcccccagggctacactggccccaactgccagaaccttgtgcactggtgtgactcctcgccctgcaagaacggcggcaaatgctggcagacccacacccagtaccgctgcgagtgccccagcggctggaccggcctttactgcgacgtgcccagcgtgtcctgtgaggtggctgcgcagcgacaaggtgttgacgttgcccgcctgtgccagcatggagggctctgtgtggacgcgggcaacacgcaccactgccgctgccaggcgggctacacaggcagctactgtgaggacctggtggacgagtgctcacccagcccctgccagaacggggccacctgcacggactacctgggcggctactcctgcaaggtgcgtggccggctaccacggggtgaactgctctgaggagatcgacgagtgcctctcccacccctgccagaacgggggcacctgcctcgacctccccaacacctacaagtgctcctgcccacggggcactcagggtgtgcactgtgagatcaacgtggacgactgcaatccccccgttgaccccgtgtcccggagccccaagtgctttaacaacggcacctgcgtggaccaggtgggcggctacagctgcacctgcccgccgggcttcgtgggtgagcgctgtgagggggatgtcaacgagtgcctgtccaatccctgcgacgcccgtggcacccagaactgcgtgcagcgcgtcaatgacttccactgcgagtgccgtgctggtcacaccgggcgccgctgcgagtccgtcatcaatggctgcaaaggcaagccctgcaagaatgggggcacctgcgccgtggcctccaacaccgcccgcgggttcatctgcaagtgccctgcgggcttcgagggcgccacgtgtgagaatgacgctcgtacctgcggcagcctgcgctgcctcaacggcggcacatgcatctccggcccgcgcagccccacctgcctgtgcctgggccccttcacgggccccgaatgccagttcccggccagcagcccctgcctgggcggcaacccctgctacaaccaggggacctgtgagcccacatccgagagccccttctaccgttgcctgtgccccgccaaattcaacgggctcttgtgccacatcctggactacagcttcgggggtggggccgggcgcgacatccccccgccgctgatcgaggaggcgtgcgagctgcccgagtgccaggaggacgcgggcaacaaggtctgcagcctgcagtgcaacaaccacgcgtgcggctgggacggcggtgactgctccctcaacttcaatgacccctggaagaactgcacgcagtctctgcagtgctggaagtacttcagtgacggccactgtgacagccagtgcaactcagccggctgcctcttcgacggctttgactgccagcgtgcggaaggccagtgcaaccccctgtacgaccagtactgcaaggaccacttcagcgacgggcactgcgaccagggctgcaacagcgcggagtgcgagtgggacgggctggactgtgcggagcatgtacccgagaggctggcggccggcacgctggtggtggtggtgctgatgccgccggagcagctgcgcaacagctccttccacttcctgcgggagctcagccgcgtgctgcacaccaacgtggtcttcaagcgtgacgcacacggccagcagatgatcttcccctactacggccgcgaggaggagctgcgcaagcaccccatcaagcgtgccgccgagggctgggccgcacctgacgccctgctgggccaggtgaaggcctcgctgctccctggtggcagcgagggtgggcggcggcggagggagctggaccccatggacgtccgcggctccatcgtctacctggagattgacaaccggcagtgtgtgcaggcctcctcgcagtgcttccagagtgccaccgacgtggccgcattcctgggagcgctcgcctcgctgggcagcctcaacatcccctacaagatcgaggccgtgcagatgagaccgtggagccgcccccgccggcgcagctgcacttcatgtacgtggcggcggccgcctttgtgcttctgttcttcgtgggctgcggggtgctgctgtcccgcaagcgccggcggcagcatggccagctctggttccctgagggcttcaaagtgtctgaggccagcaagaagaagcggcgggagcccctcggcgaggactccgtgggcctcaagcccctgaagaacgcttcagacggtgccctcatggacgacaaccagaatgagtggggggacgaggacctggagaccaagaagttccggttcgaggagcccgtggttctgcctgacctggacgaccagacagaccaccggcagtggactcagcagcacctggatgccgctgacctgcgcatgtctgccatggcccccacaccgccccagggtgaggttgacgccgactgcatggacgtcaatgtccgcgggcctgatggcttcaccccgctcatgatcgcctcctgcagcgggggcggcctggagacgggcaacagcgaggaagaggaggacgcgccggccgtcatctccgacttcatctaccagggcgccagcctgcacaaccagacagaccgcacgggcgagaccgccttgcacctggccgcccgctactcacgctctgatgccgccaagcgcctgctggaggccagcgcagatgccaacatccaggacaacatgggccgcaccccgctgcatgcggctgtgtctgccgacgcacaaggtgtcttccagatcctgatccggaaccgagccacagacctggatgcccgcatgcatgatggcacgacgccactgatcctggctgcccgcctggccgtggagggcatgctggaggacctcatcaactcacacgccgacgtcaacgccgtagatgacctgggcaagtccgccctgcactgggccgccgccgtgaacaatgtggatgccgcagttgtgctcctgaagaacggggctaacaaagatatgcagaacaacagggaggagacacccctgtttctggccgcccgggagggcagctacgagaccgccaaggtgctgctggaccactttgccaaccgggacatcacggatcatatggaccgcctgccgcgcgacatcgcacaggagcgcatgcatcacgacatcgtgaggctgctggacgagtacaacctggtgcgcagcccgcagctgcacggagccccgctggggggcacgcccaccctgtcgcccccgctctgctcgcccaacggctacctgggcagcctcaagcccggcgtgcagggcaagaaggtccgcaagcccagcagcaaaggcctggcctgtggaagcaaggaggccaaggacctcaaggcacggaggaagaagtcccaggacggcaagggctgcctgctggacagctccggcatgctctcgcccgtggactccctggagtcaccccatggctacctgtcagacgtggcctcgccgccactgctgccctccccgttccagcagtctccgtccgtgcccctcaaccacctgcctgggatgcccgacacccacctgggcatcgggcacctgaacgtggcggccaagcccgagatggcggcgctgggtgggggcggccggctggcctttgagactggcccacctcgtctctcccacctgcctgtggcctctggcaccagcaccgtcctgggctccagcagcggaggggccctgaatttcactgtgggcgggtccaccagtttgaatggtcaatgcgagtggctgtcccggctgcagagcggcatggtgccgaaccaatacaaccctctgcgggggagtgtggcaccaggccccctgagcacacaggccccctccctgcagcatggcatggtaggcccgctgcacagtagccttgctgccagcgccctgtcccagatgatgagctaccagggcctgcccagcacccggctggccacccagcctcacctggtgcagacccagcaggtgcagccacaaaacttacagatgcagcagcagaacctgcagccagcaaacatccagcagcagcaaagcctgcagccgccaccaccaccaccacagccgcaccttggcgtgagctcagcagccagcggccacctgggccggagcttcctgagtggagagccgagccaggcagacgtgcagccactgggccccagcagcctggcggtgcacactattctgccccaggagagccccgccctgcccacgtcgctgccatcctcgctggtcccacccgtgaccgcagcccagttcctgacgcccccctcgcagcacagctactcctcgcctgtggacaacacccccagccaccagctacaggtgcctgagcaccccttcctcaccccgtcccctgagtcccctgaccagtggtccagctcgtccccgcattccaacgtctccgactggtccgagggcgtctccagccctcccaccagcatgcagtcccagatcgcccgcattccggaggccttcaagtaa

SEQ ID NO: 60 - DNA, 2460 bp, Homo sapiens
atgtacgtggcggcggccgcctttgtgcttctgttcttcgtgggctgcggggtgctgctgtcccgcaagcgccggcggcagcatggccagctctggttccctgagggcttcaaagtgtctgaggccagcaagaagaagcggcgggagcccctcggcgaggactccgtgggcctcaagcccctgaagaacgcttcagacggtgccctcatggacgacaaccagaatgagtggggggacgaggacctggagaccaagaagttccggttcgaggagcccgtggttctgcctgacctggacgaccagacagaccaccggcagtggactcagcagcacctggatgccgctgacctgcgcatgtctgccatggcccccacaccgccccagggtgaggttgacgccgactgcatggacgtcaatgtccgcgggcctgatggcttcaccccgctcatgatcgcctcctgcagcgggggcggcctggagacgggcaacagcgaggaagaggaggacgcgccggccgtcatctccgacttcatctaccagggcgccagcctgcacaaccagacagaccgcacgggcgagaccgccttgcacctggccgcccgctactcacgctctgatgccgccaagcgcctgctggaggccagcgcagatgccaacatccaggacaacatgggccgcaccccgctgcatgcggctgtgtctgccgacgcacaaggtgtcttccagatcctgatccggaaccgagccacagacctggatgcccgcatgcatgatggcacgacgccactgatcctggctgcccgcctggccgtggagggcatgctggaggacctcatcaactcacacgccgacgtcaacgccgtagatgacctgggcaagtccgccctgcactgggccgccgccgtgaacaatgtggatgccgcagttgtgctcctgaagaacggggctaacaaagatatgcagaacaacagggaggagacacccctgtttctggccgcccgggagggcagctacgagaccgccaaggtgctgctggaccactttgccaaccgggacatcacggatcatatggaccgcctgccgcgcgacatcgcacaggagcgcatgcatcacgacatcgtgaggctgctggacgagtacaacctggtgcgcagcccgcagctgcacggagccccgctggggggcacgcccaccctgtcgcccccgctctgctcgcccaacggctacctgggcagcctcaagcccggcgtgcagggcaagaaggtccgcaagcccagcagcaaaggcctggcctgtggaagcaaggaggccaaggacctcaaggcacggaggaagaagtcccaggacggcaagggctgcctgctggacagctccggcatgctctcgcccgtggactccctggagtcaccccatggctacctgtcagacgtggcctcgccgccactgctgccctccccgttccagcagtctccgtccgtgcccctcaaccacctgcctgggatgcccgacacccacctgggcatcgggcacctgaacgtggcggccaagcccgagatggcggcgctgggtgggggcggccggctggcctttgagactggcccacctcgtctctcccacctgcctgtggcctctggcaccagcaccgtcctgggctccagcagcggaggggccctgaatttcactgtgggcgggtccaccagtttgaatggtcaatgcgagtggctgtcccggctgcagagcggcatggtgccgaaccaatacaaccctctgcgggggagtgtggcaccaggccccctgagcacacaggccccctccctgcagcatggcatggtaggcccgctgcacagtagccttgctgccagcgccctgtcccagatgatgagctaccagggcctgcccagcacccggctggccacccagcctcacctggtgcagacccagcaggtgcagccacaaaacttacagatgcagcagcagaacctgcagccagcaaacatccagcagcagcaaagcctgcagccgccaccaccaccaccacagccgcaccttggcgtgagctcagcagccagcggccacctgggccggagcttcctgagtggagagccgagccaggcagacgtgcagccactgggccccagcagcctggcggtgcacactattctgccccaggagagccccgccctgcccacgtcgctgccatcctcgctggtcccacccgtgaccgcagcccagttcctgacgcccccctcgcagcacagctactcctcgcctgtggacaacacccccagccaccagctacaggtgcctgagcaccccttcctcaccccgtcccctgagtcccctgaccagtggtccagctcgtccccgcattccaacgtctccgactggtccgagggcgtctccagccctcccaccagcatgcagtcccagatcgcccgcattccggaggccttcaagtaa

SEQ ID NO: 61 - protein, 5 aa, Unknown
  cytokine receptor extracellular motif found in many species
  misc_feature 3: "Xaa" at position 3 can be any amino acid.
WSXWS

1. A method of screening for anticancer activity comprising detecting a difference between the levels of an expression product of a cancer associated (CA) gene in a cell in the presence and absence of an anticancer drug candidate, said expression product comprising a nucleotide sequence having at least 95% sequence identity to a sequence selected from the group consisting of SEQ ID NO:43 to SEQ ID NO:48, or a complement thereof, whereby a difference of at least 50% in the levels of the expression product in the presence of the anticancer drug candidate compared to the levels of the expression product in the absence of the anticancer drug candidate indicates that the anticancer drug candidate has anticancer activity.

2. The method of screening for anticancer activity according to claim 1, wherein the drug candidate is an inhibitor of transcription.

3. The method of screening for anticancer activity according to claim 1, wherein the drug candidate is an inhibitor of expression.

4. The method of claim 1, wherein the nucleotide sequence has a sequence identity of at least about 98% with a sequence selected from the group consisting of SEQ ID NO:43 to SEQ ID NO:48, or a complement thereof.

5. The method of claim 1, wherein said nucleotide sequence comprises a sequence selected from the group consisting of SEQ ID NO:43 to SEQ ID NO:48, or complement thereof.

6. The method of claim 1 wherein the cell is derived from a patient sample.

7. The method of screening for anticancer activity according to claim 1, wherein the drug candidate is a tyrosine kinase antagonist, a modulator of signaling, an inhibitor of cell adhesion, a stimulator of apoptosis, a modulator of amino acid transport, or a modulator of ion transport.

8. The method of claim 1, wherein the cancer is colon cancer.

9. A method for diagnosing cancer comprising:
a) determining the level of an expression product comprising an nucleotide sequence having at least 95% sequence identity to a sequence selected from the group consisting of SEQ ID NO:43 to SEQ ID NO:48, or a complement thereof, in a sample comprising a first tissue type of a first individual; and b) comparing said levels of the expression product in (a) to:
(1) levels of the expression product in a second sample, said second sample comprising a second normal tissue type from said first individual, or
(2) levels of the expression product in a third sample, said third sample comprising a normal tissue type from a second unaffected individual;
wherein an increase of at least 50% between the level of the expression products in (a) and the level of the expression products in the second sample or the third sample indicates that the first individual has cancer.

10. The method of claim 9, wherein the nucleotide sequence has a sequence identity of at least about 98% with a sequence selected from the group consisting of SEQ ID NO:43 to SEQ ID NO:48, or a complement thereof.

11. The method of claim 9, wherein said nucleotide sequence comprises a sequence selected from the group consisting of SEQ ID NO:43 to SEQ ID NO:48, or complement thereof.

12. The method of claim 9, wherein the difference between the level of the expression products in (a) and the level of the expression products in the second or the third sample is at least 100%.

13. The method of claim 9, wherein the difference between the level of the expression products in (a) and the level of the expression products in the second or the third sample is at least 150%.

14. The method of claim 9, wherein the cancer is colon cancer.

15. A method for treating cancer in a patient comprising modulating the level of an expression product comprising a nucleotide sequence having at least 95% sequence identity to a sequence selected from the group consisting of SEQ ID NO:43 to SEQ ID NO:48, or a complement thereof.

16. The method for treating cancer of claim 15, comprising administering to the patient an antibody, a nucleic acid, or a polypeptide that modulates the level of the expression product.

17. The method for treating cancer of claim 15, wherein the expression product comprises a nucleotide sequence having at least 98% sequence identity to a sequence selected from the group consisting of SEQ ID NO:43 to SEQ ID NO:48, or a complement thereof.

18. The method for treating cancer of claim 15, wherein the expression product comprises a sequence selected from the group consisting of SEQ ID NO:43 to SEQ ID NO:48, or complement thereof.

19. The method of claim 15, wherein the cancer is colon cancer.
